(19) United States
(12) Patent Application Publication
(10) Pub. No.: US 2004/0044181 A1
(43) Pub. Date: Mar. 4, 2004

(54) Novel nucleic acids and polypeptides

(76) Inventors: Y. Tom Tang, San Jose, CA (US); Chenghua Liu, San Jose, CA (US); Vinod Asundi, Foster City, CA (US); Tom Wehrman, Stanford, CA (US); Feiyan Ren, Cupertino, CA (US); Ping Zhou, Cupertino, CA (US); Qing A. Zhao, San Jose, CA (US); Radoje T. Drmanac, Palo Alto, CA (US); Jie Zhang, Campbell, CA (US); Aidong Xue, Sunnyvale, CA (US); Jian-Rui Wang, Cupertino, CA (US); Dunrui Wang, Poway, CA (US)

Correspondence Address: NUVELO, 675 ALMANOR AVE., SUNNYVALE, CA, 94085, US

(21) Appl. No.: 10/363,616

(22) PCT Filed: Aug. 31, 2001
(86) PCT No.: PCT/US01/27093

(51) Int. Cl. C07K 14/705; C12P 21/02; C12N 5/06; C07H 21/04

(52) U.S. Cl. 530/350; 435/69.1; 435/320.1; 435/325; 536/23.5

(57) ABSTRACT

The present invention provides novel nucleic acids, novel polypeptide sequences encoded by these nucleic acids and uses thereof.

### 1. TECHNICAL FIELD

[0001] The present invention provides novel polynucleotides and proteins encoded by such polo nucleotides, along with uses for these polynucleotides and proteins, for example in therapeutic, diagnostic and research methods.

### 2. BACKGROUND

[0002] Technology aimed at the discovery of protein factors (including e.g., cytokines, such as lymphokines, interferons, circulating soluble factors, chemokines, and interleukins) has matured rapidly over the past decade. The now routine hybridization cloning and expression cloning techniques clone novel polynucleotides “directly” in the sense that they rely on information directly related to the discovered protein (i.e., partial DNA/amino acid sequence of the protein in the case of hybridization cloning; activity of the protein in the case of expression cloning). More recent “indirect” cloning techniques such as signal sequence cloning, which isolates DNA sequences based on the presence of a now well-recognized secretory leader sequence motif, as well as various PCR-based or low stringency hybridization-based cloning techniques, have advanced the state of the art by making available large numbers of DNA/amino acid sequences for proteins that are known to have biological activity, for example, by virtue of their secreted nature in the case of leader sequence cloning, by virtue of their cell or tissue source in the case of PCR-based techniques, or by virtue of structural similarity to other genes of known biological activity.

[0003] Identified polynucleotide and polypeptide sequences have numerous applications in, for example, diagnostics, forensics, gene mapping; identification of mutations responsible for genetic disorders or other traits, to assess biodiversity, and to produce many other types of data and products dependent on DNA and amino acid sequences.

### 3. SUMMARY OF THE INVENTION

[0004] The compositions of the present invention include novel isolated polypeptides, novel isolated polynucleotides encoding such polypeptides, including recombinant DNA molecules, cloned genes or degenerate variants thereof, especially naturally occurring variants such as allelic variants, antisense polynucleotide molecules, and antibodies that specifically recognize one or more epitopes present on such polypeptides, as well as hybridomas producing such antibodies.

[0005] The compositions of the present invention additionally include vectors, including expression vectors, containing the polynucleotides of the invention, cells genetically engineered to contain such polynucleotides and cells genetically engineered to express such polynucleotides.

[0006] The present invention relates to a collection or library of at least one novel nucleic acid sequence assembled from expressed sequence tags (ESTs) isolated mainly by sequencing by hybridization (SBH), and in some cases, sequences obtained from one or more public databases. The invention relates also to the proteins encoded by such polynucleotides, along with therapeutic, diagnostic and research utilities for these polynucleotides and proteins. These nucleic acid sequences are designated as SEQ ID NO: 1-245. The polypeptides sequences are designated SEQ ID NO: 246-490. The nucleic acids and polypeptides are provided in the Sequence Listing. In the nucleic acids provided in the Sequence Listing, A is adenosine; C is cytosine; G is guanine; T is thymine; and N is unknown or any of the four bases.

[0007] The nucleic acid sequences of the present invention also include, nucleic acid sequences that hybridize to the complement of SEQ ID NO: 1-245 under stringent hybridization conditions; nucleic acid sequences which are allelic variants or species homologues of any of the nucleic acid sequences recited above, or nucleic acid sequences that encode a peptide comprising a specific domain or truncation of the peptides encoded by SEQ ID NO: 1-245. A polynucleotide comprising a nucleotide sequence having at least 90% identity to an identifying sequence of SEQ ID NO: 1-245 or a degenerate variant or fragment thereof. The identifying sequence can be 100 base pairs in length.

[0008] The nucleic acid sequences of the present invention also include the sequence information from the nucleic acid sequences of SEQ ID NO: 1-245. The sequence information can be a segment of any one of SEQ ID NO: 1-245 that uniquely identifies or represents the sequence information of SEQ ID NO: 1-245.

[0009] A collection as used in this application can be a collection of only one polynucleotide. The collection of sequence information or identifying information of each sequence can be provided on a nucleic acid array. In one embodiment, segments of sequence information are provided on a nucleic acid array to detect the polynucleotide that contains the segment. The array can be designed to detect full-match or mismatch to the polynucleotide that contains the segment. The collection can also be provided in a computer-readable format.

[0010] This invention also includes the reverse or direct complement of any of the nucleic acid sequences recited above; cloning or expression vectors containing the nucleic acid sequences; and host cells or organisms transformed with these expression vectors. Nucleic acid sequences (or their reverse or direct complements) according to the invention have numerous applications in a variety of techniques known to those skilled in the art of molecular biology, such as use as hybridization probes, use as primers for PCR, use in an array, use in computer-readable media, use in sequencing full-length genes, use for chromosome and gene mapping, use in the recombinant production of protein, and use in the generation of anti-sense DNA or RNA, their chemical analogs and the like.

[0011] In a preferred embodiment, the nucleic acid sequences of SEQ ID NO: 1-245 or novel segments or parts of the nucleic acids of the invention are used as primers in expression assays that are well known in the art. In a particularly preferred embodiment, the nucleic acid sequences of SEQ ID NO: 1-245 or novel segments or parts of the nucleic acids provided herein are used in diagnostics for identifying expressed genes or, as well known in the art and exemplified by Vollrath et al., Science 258:52-59 (1992), as expressed sequence tags for physical mapping of the human genome.

[0012] The isolated polynucleotides of the invention include, but are not limited to, a polynucleotide comprising any one of the nucleotide sequences set forth in SEQ ID NO: 1-245; a polynucleotide comprising any of the full length protein coding sequences of SEQ ID NO: 1-245; and a polynucleotide comprising any of the nucleotide sequences of the mature protein coding sequences of SEQ ID NO: 1-245. The polynucleotides of the present invention also include, but are not limited to, a polynucleotide that hybridizes under stringent hybridization conditions to (a) the complement of any one of the nucleotide sequences set forth in SEQ ID NO: 1-245; (b) a nucleotide sequence encoding any one of the amino acid sequences set forth in the Sequence Listing; (c) a polynucleotide which is an allelic variant of any polynucleotides recited above; (d) a polynucleotide which encodes a species homolog (e.g. orthologs) of any of the proteins recited above; or (e) a polynucleotide that encodes a polypeptide comprising a specific domain or truncation of any of the polypeptides comprising an amino acid sequence set forth in the Sequence Listing.

[0013] The isolated polypeptides of the invention include, but are not limited to, a polypeptide comprising any of the amino acid sequences set forth in SEQ ID NO: 246-490; or the corresponding full length or mature protein. Polypeptides of the invention also include polypeptides with biological activity that are encoded by (a) any of the polynucleotides having a nucleotide sequence set forth in SEQ ID NO: 1-245; or (b) polynucleotides that hybridize to the complement of the polynucleotides of (a) under stringent hybridization conditions. Biologically or immunologically active variants of any of the polypeptide sequences in the Sequence Listing, and “substantial equivalents” thereof (e.g., with at least about 65%, 70%, 75%, 80%, 85%, 90%, 95%, 98% or 99% amino acid sequence identity) that preferably retain biological activity are also contemplated. The polypeptides of the invention may be wholly or partially chemically synthesized but are preferably produced by recombinant means using the genetically engineered cells (e.g. host cells) of the invention.

[0014] The invention also provides compositions comprising a polypeptide of the invention. Polypeptide compositions of the invention may further comprise an acceptable carrier, such as a hydrophilic, e.g., pharmaceutically acceptable, carrier.

[0015] The invention also provides host cells transformed or transfected with a polynucleotide of the invention.

[0016] The invention also relates to methods for producing a polypeptide of the invention comprising growing a culture of the host cells of the invention in a suitable culture medium under conditions permitting expression of the desired polypeptide, and purifying the polypeptide from the culture or from the host cells. Preferred embodiments include those in which the protein produced by such process is a mature form of the protein.

[0017] Polynucleotides according to the invention have numerous applications in a variety of techniques known to those skilled in the art of molecular biology. These techniques include use as hybridization probes, use as oligomers, or primers, for PCR, use for chromosome and gene mapping, use in the recombinant production of protein, and use in generation of anti-sense DNA or RNA, their chemical analogs and the like. For example, when the expression of an mRNA is largely restricted to a particular cell or tissue type, polynucleotides of the invention can be used as hybridization probes to detect the presence of the particular cell or tissue mRNA in a sample using, e.g., in situ hybridization.

[0018] In other exemplary embodiments, the polynucleotides are used in diagnostics as expressed sequence tags for identifying expressed genes or, as well known in the art and exemplified by Vollrath et al., Science 258:52-59 (1992), as expressed sequence tags for physical mapping of the human genome.

[0019] The polypeptides according to the invention can be used in a variety of conventional procedures and methods that are currently applied to other proteins. For example, a polypeptide of the invention can be used to generate an antibody that specifically binds the polypeptide. Such antibodies, particularly monoclonal antibodies, are useful for detecting or quantitating the polypeptide in tissue. The polypeptides of the invention can also be used as molecular weight markers, and as a food supplement.

[0020] Methods are also provided for preventing, treating, or ameliorating a medical condition which comprises the step of administering to a mammalian subject a therapeutically effective amount of a composition comprising a polypeptide of the present invention and a pharmaceutically acceptable carrier.

[0021] In particular, the polypeptides and polynucleotides of the invention can be utilized, for example, in methods for the prevention and/or treatment of disorders involving aberrant protein expression or biological activity.

[0022] The present invention further relates to methods for detecting the presence of the polynucleotides or polypeptides of the invention in a sample. Such methods can, for example, be utilized as part of prognostic and diagnostic evaluation of disorders as recited herein and for the identification of subjects exhibiting a predisposition to such conditions. The invention provides a method for detecting the polynucleotides of the invention in a sample, comprising contacting the sample with a compound that binds to and forms a complex with the polynucleotide of interest for a period sufficient to form the complex and under conditions sufficient to form a complex and detecting the complex such that if a complex is detected, the polynucleotide of interest is detected. The invention also provides a method for detecting the polypeptides of the invention in a sample comprising contacting the sample with a compound that binds to and forms a complex with the polypeptide under conditions and for a period sufficient to form the complex and detecting the formation of the complex such that if a complex is formed, the polypeptide is detected.

[0023] The invention also provides kits comprising polynucleotide probes and/or monoclonal antibodies, and optionally quantitative standards, for carrying out methods of the invention. Furthermore, the invention provides methods for evaluating the efficacy of drugs, and monitoring the progress of patients, involved in clinical trials for the treatment of disorders as recited above.

[0024] The invention also provides methods for the identification of compounds that modulate (i.e., increase or decrease) the expression or activity of the polynucleotides and/or polypeptides of the invention. Such methods can be utilized, for example, for the identification of compounds that can ameliorate symptoms of disorders as recited herein. Such methods can include, but are not limited to, assays for identifying compounds and other substances that interact with (e.g., bind to) the polypeptides of the invention. The invention provides a method for identifying a compound that binds to the polypeptides of the invention comprising contacting the compound with a polypeptide of the invention in a cell for a time sufficient to form a polypeptide/compound complex, wherein the complex drives expression of a reporter gene sequence in the cell; and detecting the complex by detecting the reporter gene sequence expression such that if expression of the reporter gene is detected the compound the binds to a polypeptide of the invention is identified.

[0025] The methods of the invention also provide methods for treatment which involve the administration of the polynucleotides or polypeptides of the invention to individuals exhibiting symptoms or tendencies. In addition, the invention encompasses methods for treating diseases or disorders as recited herein comprising administering compounds and other substances that modulate the overall activity of the target genie products. Compounds and other substances can effect such modulation either on the level of target gene/protein expression or target protein activity.

[0026] The polypeptides of the present invention and the polynucleotides encoding them are also useful for the same functions known to one of skill in the art as the polypeptides and polynucleotides to which they have homology (set forth in Table 2); for which they have a signature region (as set forth in Table 3); or for which they have homology to a gene family (as set forth in Table 4). If no homology is set forth for a sequence, then the polypeptides and polynucleotides of the present invention are useful for a variety of applications, as described herein, including use in arrays for detection.

### 4. DETAILED DESCRIPTION OF THE INVENTION

[0027] 4.1 Definitions

[0028] It must be noted that as used herein and in the appended claims, the singular forms a “an” and “the” include plural references unless the context clearly dictates otherwise.

[0029] The term “active” refers to those forms of the polypeptide which retain the biologic and/or immunologic activities of any naturally occurring polypeptide. According to the invention, the terms “biologically active” or “biological activity” refer to a protein or peptide having structural, regulatory or biochemical functions of a naturally occurring molecule. Likewise “immunologically active” or “immunological activity” refers to the capability of the natural, recombinant or synthetic polypeptide to induce a specific immune response in appropriate animals or cells and to bind with specific antibodies.

[0030] The term “activated cells” as used in this application are those cells which are engaged in extracellular or intracellular membrane trafficking, including the export of secretory or enzymatic molecules as part of a normal or disease process.

[0031] The terms “complementary” or “complementarity” refer to the natural binding of polynucleotides by base pairing. For example, the sequence 5′-AGT-3′ binds to the complementary sequence 3′-TCA-5′. Complementarity between two single-stranded molecules may be “partial” such that only some of the nucleic acids bind or it may be “complete” such that total complementarity exists between the single stranded molecules. The degree of complementarity between the nucleic acid strands has significant effects on the efficiency and strength of the hybridization between the nucleic acid strands.

[0032] The term “embryonic stem cells (ES)” refers to a cell that can give rise to many differentiated cell types in an embryo or an adult, including the germ cells. The term “germ line stem cells (GSCs)” refers to stem cells derived from primordial stem cells that provide a steady and continuous source of germ cells for the production of gametes. The term “primordial germ cells (PGCs)” refers to a small population of cells set aside from other cell lineages particularly from the yolk sac, mesenteries, or gonadal ridges during embryogenesis that have the potential to differentiate into germ cells and other cells. PGCs are the source from which GSCs and ES cells are derived. The PGCs, the GSCs and the ES cells are capable of self-renewal. Thus these cells not only populate the germ line and give rise to a plurality of terminally differentiated cells that comprise the adult specialized organs, but are able to regenerate themselves.

[0033] The term “expression modulating fragment,” EMF, means a series of nucleotides which modulates the expression of an operably linked ORF or another EMF.

[0034] As used herein, a sequence is said to “modulate the expression of an operably linked sequence” when the expression of the sequence is altered by the presence of the EMF. EMFs include, but are not limited to, promoters, and promoter modulating sequences (inducible elements). One class of EMFs are nucleic acid fragments which induce the expression of an operably linked ORF in response to a specific regulatory factor or physiological event.

[0035] The terms “nucleotide sequence” or “nucleic acid” or “polynucleotide” or “oligonculeotide” are used interchangeably and refer to a heteropolymer of nucleotides or the sequence of these nucleotides. These phrases also refer to DNA or RNA of genomic or synthetic origin which may be single-stranded or double-stranded and may represent the sense or the antisense strand, to peptide nucleic acid (PNA) or to any DNA-like or RNA-like material. In the sequences herein A is adenine, C is cytosine, T is thymine, G is guanine and N is A, C, G or T (U). It is contemplated that where the polynucleotide is RNA, the T (thymine) in the sequences provided herein is substituted with U (uracil). Generally, nucleic acid segments provided by this invention may be assembled from fragments of the genome and short oligonucleotide linkers, or from a series of oligonucleotides, or from individual nucleotides, to provide a synthetic nucleic acid which is capable of being expressed in a recombinant transcriptional unit comprising regulatory elements derived from a microbial or viral operon, or a eukaryotic gene.

[0036] The terms “oligonucleotide fragment” or a “polynucleotide fragment”. “portion,” or “segment” or “probe” or “primer” are used interchangeably and refer to a sequence of nucleotide residues which are at least about 5 nucleotides, more preferably at least about 7 nucleotides, more preferably at least about 9 nucleotides, more preferably at least about 11 nucleotides and most preferably at least about 17 nucleotides. The fragment is preferably less than about 500 nucleotides, preferably less than about 200 nucleotides, more preferably less than about 100 nucleotides, more preferably less than about 50 nucleotides and most preferably less than 30 nucleotides. Preferably the probe is from about 6 nucleotides to about 200 nucleotides, preferably from about 15 to about 50 nucleotides, more preferably from about 17 to 30 nucleotides and most preferably from about 20 to 25 nucleotides. Preferably the fragments can be used in polymerase chain reaction (PCR), various hybridization procedures or microarray procedures to identify or amplify identical or related parts of mRNA or DNA molecules. A fragment or segment may uniquely identify each polynucleotide sequence of the present invention. Preferably the fragment comprises a sequence substantially similar to any one of SEQ ID NO: 1-245.

[0037] Probes may, for example, be used to determine whether specific mRNA molecules are present in a cell or tissue or to isolate similar nucleic acid sequences from chromosomal DNA as described by Walsh et al. (Walsh, P. S. et al., 1992, PCR Methods Appl 1:241-250). They may be labeled by nick translation, Klenow fill-in reaction, PCR, or other methods well known in the art. Probes of the present invention, their preparation and/or labeling are elaborated in Sambrook, J. et al., 1989, Molecular Cloning: A Laboratory Manual, Cold Spring Harbor Laboratory, NY; or Ausubel, F. M. et al., 1989, Current Protocols in Molecular Biology, John Wiley & Sons. New York N.Y. both of which are incorporated herein by reference in their entirety.

[0038] The nucleic acid sequences of the present invention also include the sequence information from the nucleic acid sequences of SEQ ID NO: 1-245. The sequence information can be a segment of any one of SEQ ID NO: 1-245 that uniquely identifies or represents the sequence information of that sequence of SEQ ID NO: 1-245. One such segment can be a twenty-mer nucleic acid sequence because the probability that a twenty-mer is fully matched in the human genome is 1 in 300. In the human genome, there are three billion base pairs in one set of chromosomes. Because 4²⁰ possible twenty-mers exist, there are 300 times more twenty-mers than there are base pairs in a set of human chromosomes. Using the same analysis, the probability for a seventeen-mer to be fully matched in the human genome is approximately 1 in 5. When these segments are used in arrays for expression studies, fifteen-mer segments can be used. The probability that the fifteen-mer is fully matched in the expressed sequences is also approximately one in five because expressed sequences comprise less than approximately 5% of the entire genome sequence.

[0039] Similarly, when using sequence information for detecting a single mismatch, a segment can be a twenty-five mer. The probability that the twenty-five mer would appear in a human genome with a single mismatch is calculated by multiplying the probability for a full match (1÷4²⁵) times the increased probability for mismatch at each nucleotide position (3×25). The probability that an eighteen mer with a single mismatch can be detected in an array for expression studies is approximately one in five. The probability that a twenty-mer with a single mismatch can be detected in a human genome is approximately one in five.

[0040] The term “open reading frame,” ORF, means a series of nucleotide triplets coding for amino acids without any termination codons and is a sequence translatable into protein.

[0041] The terms “operably linked” or “operably associated” refer to functionally related nucleic acid sequences. For example, a promoter is operably associated or operably linked with a coding sequence if the promoter controls the transcription of the coding sequence. While operably linked nucleic acid sequences can be contiguous and in the same reading frame, certain genetic elements e.g. repressor genes are not contiguously linked to the coding sequence but still control transcription/translation of the coding sequence.

[0042] The term “pluripotent” refers to the capability of a cell to differentiate into a number of differentiated cell types that are present in an adult organism. A pluripotent cell is restricted in its differentiation capability in comparison to a totipotent cell.

[0043] The terms “polypeptide” or “peptide” or “amino acid sequence” refer to an oligopeptide, peptide, polypeptide or protein sequence or fragment thereof and to naturally occurring or synthetic molecules. A polypeptide “fragment,” “portion,” or “segment” is a stretch of amino acid residues of at least about 5 amino acids, preferably at least about 7 amino acids, more preferably at least about 9 amino acids and most preferably at least about 17 or more amino acids. The peptide preferably is not greater than about 500 amino acids, more preferably less than 200 amino acids more preferably less than 150 amino acids and most preferably less than 100 amino acids. Preferably the peptide is from about 5 to about 200 amino acids. To be active, any polypeptide must have sufficient length to display biological and/or immunological activity.

[0044] The term “naturally occurring polypeptide” refers to polypeptides produced by cells that have not been genetically engineered and specifically contemplates various polypeptides arising from post-translational modifications of the polypeptide including, but not limited to, acetylation, carboxylation, glycosylation, phosphorylation, lipidation and acylation.

[0045] The term “translated protein coding portion” means a sequence which encodes for the full length protein which may include any leader sequence or any processing sequence.

[0046] The term “mature protein coding sequence” means a sequence which encodes a peptide or protein without a signal or leader sequence. The “mature protein portion” means that portion of the protein which does not include a signal or leader sequence. The peptide may have been produced by processing in the cell which removes any leader/signal sequence. The mature protein portion may or may not include an initial methionine residue. The methionine residue may be removed from the protein during processing in the cell. The peptide may be produced synthetically or the protein may have been produced using a polynucleotide only encoding for the mature protein coding sequence.

[0047] The term “derivative” refers to polypeptides chemically modified by such techniques as ubiquitination, labeling (e.g., with radionuclides or various enzymes), covalent polymer attachment such as pegylation (derivatization with polyethylene glycol) and insertion or substitution by chemical synthesis of amino acids such as ornithine, which do not normally occur in human proteins.

[0048] The term “variant” (or “analog”) refers to any polypeptide differing from naturally occurring polypeptides by amino acid insertions, deletions, and substitutions, created using, e g., recombinant DNA techniques. Guidance in determining which amino acid residues may be replaced, added or deleted without abolishing activities of interest, may be found by comparing the sequence of the particular polypeptide with that of homologous peptides and minimizing the number of amino acid sequence changes made in regions of high homology (conserved regions) or by replacing amino acids with consensus sequence.

[0049] Alternatively, recombinant variants encoding these same or similar polypeptides may be synthesized or selected by making use of the “redundancy” in the genetic code. Various codon substitutions, such as the silent changes which produce various restriction sites, may be introduced to optimize cloning into a plasmid or viral vector or expression in a particular prokaryotic or eukaryotic system. Mutations in the polynucleotide sequence may be reflected in the polypeptide or domains of other peptides added to the polypeptide to modify the properties of any part of the polypeptide, to change characteristics such as ligand-binding affinities, interchain affinities, or degradation/turnover rate.

[0050] Preferably, amino acid “substitutions” are the result of replacing one amino acid with another amino acid having similar structural and/or chemical properties, i.e., conservative amino acid replacements. “Conservative” amino acid substitutions may be made on the basis of similarity in polarity, charge, solubility, hydrophobicity, hydrophilicity, and/or the amphipathic nature of the residues involved. For example, nonpolar (hydrophobic) amino acids include alanine, leucine, isoleucine, valine, proline, phenylalanine, tryptophan, and methionine; polar neutral amino acids include glycine, serine, threonine, cysteine, tyrosine, asparagine, and glutamine; positively charged (basic) amino acids include arginine, lysine, and histidine; and negatively charged (acidic) amino acids include aspartic acid and glutamic acid. “Insertions” or “deletions” are preferably in the range of about 1 to 20 amino acids, more preferably 1 to 10 amino acids. The variation allowed may be experimentally determined by systematically making insertions, deletions, or substitutions of amino acids in a polypeptide molecule using recombinant DNA techniques and assaying the resulting recombinant variants for activity.

[0051] Alternatively, where alteration of function is desired, insertions, deletions or non-conservative alterations can be engineered to produce altered polypeptides. Such alterations can, for example, alter one or more of the biological functions or biochemical characteristics of the polypeptides of the invention. For example, such alterations may change polypeptide characteristics such as ligand-binding affinities, interchain affinities, or degradation/turnover rate. Further, such alterations can be selected so as to generate polypeptides that are better suited for expression, scale up and the like in the host cells chosen for expression. For example, cysteine residues can be deleted or substituted with another amino acid residue in order to eliminate disulfide bridges.

[0052] The terms “purified” or “substantially purified” as used herein denotes that the indicated nucleic acid or polypeptide is present in the substantial absence of other biological macromolecules, e.g., polynucleotides, proteins, and the like. In one embodiment, the polynucleotide or polypeptide is purified such that it constitutes at least 95% by weight, more preferably at least 99% by weight, of the indicated biological macromolecules present (but water, buffers, and other small molecules, especially molecules having a molecular weight of less than 1000 daltons, can be present).

[0053] The term “isolated” as used herein refers to a nucleic acid or polypeptide separated from at least one other component (e.g., nucleic acid or polypeptide) present with the nucleic acid or polypeptide in its natural source. In one embodiment, the nucleic acid or polypeptide is found in the presence of (if anything) only a solvent, buffer, ion, or other component normally present in a solution of the same. The terms “isolated” and “purified” do not encompass nucleic acids or polypeptides present in their natural source.

[0054] The term “recombinant,” when used herein to refer to a polypeptide or protein, means that a polypeptide or protein is derived from recombinant (e.g., microbial, insect, or mammalian) expression systems. “Microbial” refers to recombinant polypeptides or proteins made in bacterial or fungal (e.g., yeast) expression systems. As a product, “recombinant microbial” defines a polypeptide or protein essentially free of native endogenous substances and unaccompanied by associated native glycosylation. Polypeptides or proteins expressed in most bacterial cultures, e.g., E. coli will be free of glycosylation modifications; polypeptides or proteins expressed in yeast will have a glycosylation pattern in general different from those expressed in mammalian cells.

[0055] The term “recombinant expression vehicle or vector” refers to a plasmid or phage or virus or vector, for expressing a polypeptide from a DNA (RNA) sequence. An expression vehicle can comprise a transcriptional unit comprising an assembly of (1) a genetic element or elements having a regulatory role in gene expression, for example, promoters or enhancers. (2) a structural or coding sequence which is transcribed into mRNA and translated into protein, and (3) appropriate transcription initiation and termination sequences. Structural units intended for use in yeast or eukaryotic expression systems preferably include a leader sequence enabling extracellular secretion of translated protein by a host cell. Alternatively, where recombinant protein is expressed without a leader or transport sequence, it may include an amino terminal methionine residue. This residue may or may not be subsequently cleaved from the expressed recombinant protein to provide a final product.

[0056] The term “recombinant expression system” means host cells which have stably integrated a recombinant transcriptional unit into chromosomal DNA or carry the recombinant transcriptional unit extrachromosomally. Recombinant expression systems as defined herein will express heterologous polypeptides or proteins upon induction of the regulatory elements linked to the DNA segment or synthetic gene to be expressed. This term also means host cells which have stably integrated a recombinant genetic element or elements having a regulatory role in gene expression, for example, promoters or enhancers. Recombinant expression systems as defined herein will express polypeptides or proteins endogenous to the cell upon induction of the regulatory elements linked to the endogenous DNA segment or gene to be expressed. The cells can be prokaryotic or eukaryotic.

[0057] The term “secreted” includes a protein that is transported across or through a membrane, including transport as a result of signal sequences in its amino acid sequence when it is expressed in a suitable host cell. “Secreted” proteins include without limitation proteins secreted wholly (e.g., soluble proteins) or partially (e.g., receptors) from the cell in which they are expressed. “Secreted” proteins also include without limitation proteins that are transported across the membrane of the endoplasmic reticulum. “Secreted” proteins are also intended to include proteins containing non-typical signal sequences (e.g. Interleukin-1 Beta, see Krasney, P. A. and Young, P. R. (1992) Cytokine 4(2): 134-143) and factors released from damaged cells (e.g. Interleukin-1 Receptor Antagonist, see Arend, W. P. et. al. (1998) Annu. Rev. Immunol. 16:27-55)

[0058] Where desired, an expression vector may be designed to contain a “signal or leader sequence” which will direct the polypeptide through the membrane of a cell. Such a sequence may be naturally present on the polypeptides of the present invention or provided from heterologous protein sources by recombinant DNA techniques.

[0059] The term “stringent” is used to refer to conditions that are commonly understood in the art as stringent. Stringent conditions can include highly stringent conditions (i.e., hybridization to filter-bound DNA in 0.5 M NaHPO₄. 7% sodium dodecyl sulfate (SDS), 1 mM EDTA at 65° C. and washing in 0. 1×SSC/0.1% SDS at 68° C.), and moderately stringent conditions (i.e., washing in 0.2×SSC/0.1% SDS at 42° C.). Other exemplary hybridization conditions are described herein in the examples.

[0060] In instances of hybridization of deoxyoligonucleotides, additional exemplary stringent hybridization conditions include washing in 6×SSC/0.05% sodium pyrophosphate at 37° C. (for 14-base oligonucleotides), 48° C. (for 17-base oligos), 55° C. (for 20-base oligonucleotides), and 60° C. (for 23-base oligonucleotides).

[0061] As used herein, “substantially equivalent” can refer both to nucleotide and amino acid sequences, for example a mutant sequence, that varies from a reference sequence by one or more substitutions, deletions, or additions, the net effect of which does not result in an adverse functional dissimilarity between the reference and subject sequences. Typically, such a substantially equivalent sequence varies from one of those listed herein by no more than about 35% (i.e., the number of individual residue substitutions, additions, and/or deletions in a substantially equivalent sequence, as compared to the corresponding reference sequence, divided by the total number of residues in the substantially equivalent sequence is about 0.35 or less). Such a sequence is said to have 65% sequence identity to the listed sequence. In one embodiment, a substantially equivalent, e.g., mutant, sequence of the invention varies from a listed sequence by no more than 30% (70% sequence identity); in a variation of this embodiment, by no more than 25% (75% sequence identity); and in a further variation of this embodiment, by no more than 20% (80% sequence identity) and in a further variation of this embodiment, by no more than 10% (90% sequence identity) and in a further variation of this embodiment, by no more that 5% (95% sequence identity). Substantially equivalent, e.g., mutant, amino acid sequences according to the invention preferably have at least 80% sequence identity with a listed amino acid sequence, more preferably at least 85% sequence identity, more preferably at least 90% sequence identity, more preferably at least 95% identity, more preferably at least 98% identity, and most preferably at least 99% identity. Substantially equivalent nucleotide sequences of the invention can have lower percent sequence identities, taking into account, for example, the redundancy or degeneracy of the genetic code. Preferably, nucleotide sequence has at least about 65% identity, more preferably at least about 75% identity, more preferably at least about 80% sequence identity, more preferably at least about 85% sequence identity, more preferably at least about 90% sequence identity, and most preferably at least about 95% identity, more preferably at least about 98% sequence identity, and most preferably at least about 99% sequence identity. For the purposes of the present invention, sequences having substantially equivalent biological activity and substantially equivalent expression characteristics are considered substantially equivalent. For the purposes of determining equivalence, truncation of the mature sequence (e.g. via a mutation which creates a spurious stop codon) should be disregarded. Sequence identity may be determined, e.g. using the Jotun Hein method (Hein. J. (1990) Methods Enzymol. 183 :626-645). Identity between sequences can also be determined by other methods known in the art, e.g. by varying hybridization conditions.

[0062] The term “totipotent” refers to the capability of a cell to differentiate into all of the cell types of an adult organism.

[0063] The term “transformation” means introducing DNA into a suitable host cell so that the DNA is replicable, either as an extrachromosomal element, or by chromosomal integration. The term “transfection” refers to the taking up of an expression vector by a suitable host cell, whether or not any coding sequences are in fact expressed. The term “infection” refers to the introduction of nucleic acids into a suitable host cell by use of a virus or viral vector.

[0064] As used herein, an “uptake modulating fragment,” UMF, means a series of nucleotides which mediate the uptake of a linked DNA fragment into a cell. UMFs can be readily identified using known UMFs as a target sequence or target motif with the computer-based systems described below. The presence and activity of a UMF can be confirmed by attaching the suspected UMF to a marker sequence. The resulting nucleic acid molecule is then incubated with an appropriate host under appropriate conditions and the uptake of the marker sequence is determined. As described above, a UMF will increase the frequency of uptake of a linked marker sequence.

[0065] Each of the above terms is meant to encompass all that is described for each, unless the context dictates otherwise.

[0066] 4.2 Nucleic Acids of the Invention

[0067] Nucleotide sequences of the invention are set forth in the Sequence Listing.

[0068] The isolated polynucleotides of the invention include a polynucleotide comprising the nucleotide sequences of SEQ ID NO: 1-245; a polynucleotide encoding any one of the peptide sequences of SEQ ID NO: 246-490; and a polynucleotide comprising the nucleotide sequence encoding the mature protein coding sequence of the polypeptides of any one of SEQ ID NO: 246-490. The polynucleotides of the present invention also include, but are not limited to, a polynucleotide that hybridizes under stringent conditions to (a) the complement of any of the nucleotides sequences of SEQ ID NO: 1-245; (b) nucleotide sequences encoding any one of the amino acid sequences set forth in the Sequence Listing as SEQ ID NO: 246-490; (c) a polynucleotide which is an allelic variant of any polynucleotide recited above: (d) a polynucleotide which encodes a species homolog of any of the proteins recited above; or (e) a polynucleotide that encodes a polypeptide comprising a specific domain or truncation of the polypeptides of SEQ ID NO: 246-490. Domains of interest may depend on the nature of the encoded polypeptide; e.g. domains in receptor-like polypeptides include ligand-binding, extracellular, transmembrane, or cytoplasmic domains, or combinations thereof; domains in immunoglobulin-like proteins include the variable immunoglobulin-like domains; domains in enzyme-like polypeptides include catalytic and substrate binding domains; and domains in ligand polypeptides include receptor-binding domains.

[0069] The polynucleotides of the invention include naturally occurring or wholly or partially synthetic DNA, e.g., cDNA and genomic DNA, and RNA, e.g., mRNA. The polynucleotides may include all of the coding region of the cDNA or may represent a portion of the coding region of the cDNA.

[0070] The present invention also provides genes corresponding to the cDNA sequences disclosed herein. The corresponding genes can be isolated in accordance with known methods using the sequence information disclosed herein. Such methods include the preparation of probes or primers from the disclosed sequence information for identification and/or amplification of genes in appropriate genomic libraries or other sources of genomic materials. Further 5′ and 3′ sequence can be obtained using methods known in the art. For example, full length cDNA or genomic DNA that corresponds to any of the polynucleotides of SEQ ID NO: 1-245 can be obtained by screening appropriate cDNA or genomic DNA libraries under suitable hybridization conditions using any of the polynucleotides of SEQ ID NO: 1-245 or a portion thereof as a probe. Alternatively, the polynucleotides of SEQ ID NO: 1-245 may be used as the basis for suitable primer(s) that allow identification and/or amplification of genes in appropriate genomic DNA or cDNA libraries.

[0071] The nucleic acid sequences of the invention can be assembled from ESTs and sequences (including cDNA and genomic sequences) obtained from one or more public databases, such as dbEST, gbpri, and UniGene. The EST sequences can provide identifying sequence information, representative fragment or segment information, or novel segment information for the full-length gene.

[0072] The polynucleotides of the invention also provide polynucleotides including nucleotide sequences that are substantially equivalent to the polynucleotides recited above. Polynucleotides according to the invention can have, e.g., at least about 65%, at least about 70%, at least about 75%, at least about 80%, 81%, 82%, 83%, 84%, more typically at least about 85%, 86%, 87%, 88%, 89%, more typically at least about 90%, 91%, 92%, 93%, 94%, and even more typically at least about 95%, 96%, 97%, 98%, 99%, sequence identity to a polynucleotide recited above.

[0073] Included within the scope of the nucleic acid sequences of the invention are nucleic acid sequence fragments that hybridize under stringent conditions to any of the nucleotide sequences of SEQ ID NO: 1-245, or complements thereof, which fragment is greater than about 5 nucleotides, preferably 7 nucleotides, more preferably greater than 9 nucleotides and most preferably greater than 17 nucleotides. Fragments of, e.g. 15, 17, or 20 nucleotides or more that are selective for (i.e. specifically hybridize to) any one of the polynucleotides of the invention are contemplated. Probes capable of specifically hybridizing to a polynucleotide can differentiate polynucleotide sequences of the invention from other polynucleotide sequences in the same family of genes or can differentiate human genes from genes of other species, and are preferably based on unique nucleotide sequences.

[0074] The sequences falling within the scope of the present invention are not limited to these specific sequences, but also include allelic and species variations thereof. Allelic and species variations can be routinely determined by comparing the sequence provided in SEQ ID NO: 1-245, a representative fragment thereof, or a nucleotide sequence at least 90% identical, preferably 95% identical, to SEQ ID NO: 1-245 with a sequence from another isolate of the same species. Furthermore, to accommodate codon variability, the invention includes nucleic acid molecules coding for the same amino acid sequences as do the specific ORFs disclosed herein. In other words, in the coding region of an ORF, substitution of one codon for another codon that encodes the same amino acid is expressly contemplated.

[0075] The nearest neighbor or homology result for the nucleic acids of the present invention, including SEQ ID NO: 1-245, can be obtained by searching a database using an algorithm or a program. Preferably, a BLAST which stands for Basic Local Alignment Search Tool is used to search for local sequence alignments (Altshul, S. F. J Mol. Evol. 36 290-300 (1993) and Altschul S. F. et al. J. Mol. Biol. 21:403-410 (1990)). Alternatively a FASTA version 3 search against Genpept, using Fastxy algorithm.

[0076] Species homologs (or orthologs) of the disclosed polynucleotides and proteins are also provided by the present invention. Species homologs may be isolated and identified by making suitable probes or primers from the sequences provided herein and screening a suitable nucleic acid source from the desired species.

[0077] The invention also encompasses allelic variants of the disclosed polynucleotides or proteins; that is, naturally-occurring alternative forms of the isolated polynucleotide which also encode proteins which are identical, homologous or related to that encoded by the polynucleotides.

[0078] The nucleic acid sequences of the invention are further directed to sequences which encode variants of the described nucleic acids. These amino acid sequence variants may be prepared by methods known in the art by introducing appropriate nucleotide changes into a native or variant polynucleotide. There are two variables in the construction of amino acid sequence variants: the location of the mutation and the nature of the mutation. Nucleic acids encoding the amino acid sequence variants are preferably constructed by mutating the polynucleotide to encode an amino acid sequence that does not occur in nature. These nucleic acid alterations can be made at sites that differ in the nucleic acids from different species (variable positions) or in highly conserved regions (constant regions). Sites at such locations will typically be modified in series, e.g. by substituting first with conservative choices (e.g., hydrophobic amino acid to a different hydrophobic amino acid) and then with more distant choices (e.g., hydrophobic amino acid to a charged amino acid), and then deletions or insertions may be made at the target site. Amino acid sequence deletions generally range from about 1 to 30 residues, preferably about 1 to 10 residues, and are typically contiguous. Amino acid insertions include amino- and/or carboxyl-terminal fusions ranging in length from one to one hundred or more residues, as well as intrasequence insertions of single or multiple amino acid residues. Intrasequence insertions may range generally from about 1 to 10 amino residues, preferably from 1 to 5 residues. Examples of terminal insertions include the heterologous signal sequences necessary for secretion or for intracellular targeting in different host cells and sequences such as FLAG or poly-histidine sequences useful for purifying the expressed protein.

[0079] In a preferred method, polynucleotides encoding the novel amino acid sequences are changed via site-directed mutagenesis. This method uses oligonucleotide sequences to alter a polynucleotide to encode the desired amino acid variant, as well as sufficient adjacent nucleotides on both sides of the changed amino acid to form a stable duplex on either side of the site of being changed. In general, the techniques of site-directed mutagenesis are well known to those of skill in the art and this technique is exemplified by publications such as, Edelman et al., DNA 2:183 (1983). A versatile and efficient method for producing site-specific changes in a polynucleotide sequence was published by Zoller and Smith, Nucleic Acids Res. 10:6487-6500 (1982). PCR may also be used to create amino acid sequence variants of the novel nucleic acids. When small amounts of template DNA are used as starting material, primer(s) that differs slightly in sequence from the corresponding region in the template DNA can generate the desired amino acid variant. PCR amplification results in a population of product DNA fragments that differ from the polynucleotide template encoding the polypeptide at the position specified by the primer. The product DNA fragments replace the corresponding region in the plasmid and this gives a polynucleotide encoding the desired amino acid variant.

[0080] A further technique for generating amino acid variants is the cassette mutagenesis technique described in Wells et al. Gene 34:315 (1985); and other mutagenesis techniques well known in the art, such as, for example, the techniques in Sambrook et al. supra, and Current Protocols in Molecular Biology. Ausubel et al. Due to the inherent degeneracy of the genetic code, other DNA sequences Which encode substantially the same or a functionally equivalent amino acid sequence may be used in the practice of the invention for the cloning and expression of these novel nucleic acids. Such DNA sequences include those which are capable of hybridizing to the appropriate novel nucleic acid sequence under stringent conditions.

[0081] Polynucleotides encoding preferred polypeptide truncations of the invention can be used to generate polynucleotides encoding chimeric or fusion proteins comprising one or more domains of the invention and heterologous protein sequences.

[0082] The polynucleotides of the invention additionally include the complement of any of the polynucleotides recited above. The polynucleotide can be DNA (genomic, cDNA, amplified, or synthetic) or RNA. Methods and algorithms for obtaining such polynucleotides are well known to those of skill in the art and can include, for example, methods for determining hybridization conditions that can routinely isolate polynucleotides of the desired sequence identities.

[0083] In accordance with the invention, polynucleotide sequences comprising the mature protein coding sequences corresponding to any one of SEQ ID NO: 1-245, or functional equivalents thereof, may be used to generate recombinant DNA molecules that direct the expression of that nucleic acid, or a functional equivalent thereof, in appropriate host cells. Also included are the cDNA inserts of any of the clones identified herein.

[0084] A polynucleotide according to the invention can be joined to any of a variety of other nucleotide sequences by well-established recombinant DNA techniques (see Sambrook J et al. (1989) Molecular Cloning: A Laboratory Manual, Cold Spring Harbor Laboratory, NY). Useful nucleotide sequences for joining to polynucleotides include an assortment of vectors, e.g., plasmids, cosmids, lambda phage derivatives, phagemids, and the like, that are well known in the art. Accordingly, the invention also provides a vector including a polynucleotide of the invention and a host cell containing the polynucleotide. In general, the vector contains an origin of replication functional in at least one organism, convenient restriction endonuclease sites, and a selectable marker for the host cell. Vectors according to the invention include expression vectors, replication vectors, probe generation vectors, and sequencing vectors. A host cell according to the invention can be a prokaryotic or eukaryotic cell and can be a unicellular organism or part of a multicellular organism.

[0085] The present invention further provides recombinant constructs comprising a nucleic acid having any of the nucleotide sequences of SEQ ID NO: 1-245 or a fragment thereof or any other polynucleotides of the invention. In one embodiment, the recombinant constructs of the present invention comprise a vector, such as a plasmid or viral vector, into which a nucleic acid having any of the nucleotide sequences of SEQ ID NO: 1-245 or a fragment thereof is inserted, in a forward or reverse orientation. In the case of a vector comprising one of the ORFs of the present invention, the vector ma! further comprise regulatory sequences, including for example, a promoter, operably linked to the ORF. Large numbers of suitable vectors and promoters are known to those of skill in the art and are commercially available for generating the recombinant constructs of the present invention. The following vectors are provided by way of example. Bacterial: pBs, phagescript. PsiX174, pBluescript SK, pBs KS, pNH8a, pNH16a, pNH18a, pNH46a (Stratagene); pTrc99A, pKK223-3, pKK233-3, pDR540, pRIT5 (Pharmacia). Eukaryotic: pWLneo, pSV2cat, pOG44, PXTI, pSG (Stratagene) pSVK3, pBPV, pMSG, pSVL (Pharmacia).

[0086] The isolated polynucleotide of the invention may be operably linked to an expression control sequence such as the pMT2 or pED expression vectors disclosed in Kaufman et al., Nucleic Acids Res. 19, 4485-4490 (1991), in order to produce the protein recombinantly. Many suitable expression control sequences are known in the art. General methods of expressing recombinant proteins are also known and are exemplified in R. Kaufman, Methods in Enzymology 185, 537-566 (1990). As defined herein “operably linked” means that the isolated polynucleotide of the invention and an expression control sequence are situated within a vector or cell in such a way that the protein is expressed by a host cell which has been transformed (transfected) with the ligated polynucleotide/expression control sequence.

[0087] Promoter regions can be selected from any desired gene using CAT (chloramphenicol transferase) vectors or other vectors with selectable markers. Two appropriate vectors are pKK232-8 and pCM7. Particular named bacterial promoters include lac, lacZ, T3, T7, gpt, lambda PR, and trc. Eukaryotic promoters include CMV immediate early, HSV thymidine kinase, early and late SV40, LTRs from retrovirus, and mouse metallothionein-1. Selection of the appropriate vector and promoter is well within the level of ordinary skill in the art. Generally, recombinant expression vectors will include origins of replication and selectable markers permitting transformation of the host cell, e.g., the ampicillin resistance gene of E. coli and S. cerevisiae TRPI gene, and a promoter derived from a highly-expressed gene to direct transcription of a downstream structural sequence. Such promoters can be derived from operons encoding glycolytic enzymes such as 3-phosphoglycerate kinase (PGK), a-factor, acid phosphatase, or heat shock proteins, among others. The heterologous structural sequence is assembled in appropriate phase with translation initiation and termination sequences, and preferably, a leader sequence capable of directing secretion of translated protein into the periplasmic space or extracellular medium. Optionally, the heterologous sequence can encode a fusion protein including an amino terminal identification peptide imparting desired characteristics, e.g. stabilization or simplified purification of expressed recombinant product. Useful expression vectors for bacterial use are constructed by inserting a structural DNA sequence encoding a desired protein together With suitable translation initiation and termination signals in operable reading phase with a functional promoter. The vector will comprise one or more phenotypic selectable markers and an origin of replication to ensure maintenance of the vector and to, if desirable, provide amplification within the host. Suitable prokaryotic hosts for transformation include E. coli, Bacillus subtilis, Salmonella typhimurium and various species within the genera Pseudomonas, Streptomyces, and Staphylococcus, although others may also be employed as a matter of choice.

[0088] As a representative but non-limiting example, useful expression vectors for bacterial use can comprise a selectable marker and bacterial origin of replication derived from commercially available plasmids comprising genetic elements of the well known cloning vector pBR322 (ATCC 37017). Such commercial vectors include, for example, pKK223-3 (Pharmacia Fine Chemicals, Uppsala, Sweden) and GEM 1 (Promega Biotech, Madison, Wis., USA). These pBR322 “backbone” sections are combined with an appropriate promoter and the structural sequence to be expressed. Following transformation of a suitable host strain and growth of the host strain to an appropriate cell density, the selected promoter is induced or derepressed by appropriate means (e.g. temperature shift or chemical induction) and cells are cultured for an additional period. Cells are typically harvested by centrifugation, disrupted by physical or chemical means, and the resulting crude extract retained for further purification.

[0089] Polynucleotides of the invention can also be used to induce immune responses. For example, as described in Fan et al., Nat. Biotech. 17:870-872 (1999), incorporated herein by reference, nucleic acid sequences encoding a polypeptide may be used to generate antibodies against the encoded polypeptide following topical administration of naked plasmid DNA or following injection, and preferably intramuscular injection of the DNA. The nucleic acid sequences are preferably inserted in a recombinant expression vector and may be in the form of naked DNA.

[0090] 4.3 Antisense Nucleic Acids

[0091] Another aspect of the invention pertains to isolated antisense nucleic acid molecules that are hybridizable to or complementary to the nucleic acid molecule comprising the nucleotide sequence of SEQ ID NO: 1-245, or fragments, analogs or derivatives thereof. An “antisense” nucleic acid comprises a nucleotide sequence that is complementary to a “sense” nucleic acid encoding a protein, e.g., complementary to the coding strand of a double-stranded cDNA molecule or complementary to an mRNA sequence. In specific aspects, antisense nucleic acid molecules are provided that comprise a sequence complementary to at least about 10, 25, 50, 100, 250 or 500 nucleotides or an entire coding strand, or to only a portion thereof. Nucleic acid molecules encoding fragments, homologs, derivatives and analogs of a protein of any of SEQ ID NO: 246-490 or antisense nucleic acids complementary to a nucleic acid sequence of SEQ ID NO: 1-245 are additionally provided.

[0092] In one embodiment, an antisense nucleic acid molecule is antisense to a “coding region” of the coding strand of a nucleotide sequence of the invention. The term “coding region” refers to the region of the nucleotide sequence comprising codons which are translated into amino acid residues. In another embodiment, the antisense nucleic acid molecule is antisense to a “noncoding region” of the coding strand of a nucleotide sequence of the invention. The term “noncoding region” refers to 5′ and 3′ sequences which flank the coding region that are not translated into amino acids (i.e., also referred to as 5′ and 3′ untranslated regions).

[0093] Given the coding strand sequences encoding a nucleic acid disclosed herein (e.g., SEQ ID NO: 1-245), antisense nucleic acids of the invention can be designed according to the rules of Watson and Crick or Hoogsteen base pairing. The antisense nucleic acid molecule can be complementary to the entire coding region of an mRNA, but more preferably is an oligonucleotide that is antisense to only a portion of the coding or noncoding region of a mRNA. For example, the antisense oligonucleotide can be complementary to the region surrounding the translation start site of a mRNA. An antisense oligonucleotide can be, for example, about 5, 10, 15, 20, 25, 30, 35, 40, 45 or 50 nucleotides in length. An antisense nucleic acid of the invention can be constructed using chemical synthesis or enzymatic ligation reactions using procedures known in the art. For example, an antisense nucleic acid (e.g., an antisense oligonucleotide) can be chemically synthesized using naturally occurring nucleotides or variously modified nucleotides designed to increase the biological stability of the molecules or to increase the (D physical stability of the duplex formed between the antisense and sense nucleic acids, e.g., phosphorothioate derivatives and acridine substituted nucleotides can be used.

[0094] Examples of modified nucleotides that can be used to generate the antisense nucleic acid include: 5-fluorouracil, 5-bromouracil, 5-chlorouracil, 5-iodouracil, hypoxanthine, xanthine. 4-acetylcytosine, 5-(carboxyhydroxylmethyl) uracil 5-carboxymethylaminomethyl-2-thiouridine, 5-carboxymethylaminomethyluracil, dihydrouracil, beta-D-galactosylqueosine, inosine, N6-isopentenyladenine, 1-methylguanine, 1-methylinosine, 2,2-dimethylguanine, 2-methyladenine, 2-methylguanine, 3-methylcytosine, 5-methylcytosine, N6-adenine, 7-methylguanine, 5-methylaminomethyluracil, 5-methoxyaminomethyl-2-thiouracil, beta-D-mannosylqueosine, 5′-methoxycarboxymethyluracil, 5-methoxyuracil, 2-methylthio-N6-isopentenyladenine, uracil-5-oxyacetic acid (v), wybutoxosine, pseudouracil, queosine, 2-thiocytosine, 5-methyl-2-thiouracil, 2-thiouracil, 4-thiouracil, 5-methyluracil, uracil-5-oxyacetic acid methylester, uracil-5-oxyacetic acid (v), 5-methyl-2-thiouracil, 3-(3-amino-3-N-2-carboxypropyl) uracil, (acp3)w, and 2,6-diaminopurine. Alternatively, the antisense nucleic acid can be produced biologically using an expression vector into which a nucleic acid has been subcloned in an antisense orientation (i.e., RNA transcribed from the inserted nucleic acid will be of an antisense orientation to a target nucleic acid of interest, described further in the following subsection).

[0095] The antisense nucleic acid molecules of the invention are typically administered to a subject or generated in situ such that they hybridize with or bind to cellular mRNA and/or genomic DNA encoding a protein according to the invention to thereby inhibit expression of the protein, e.g., by inhibiting transcription and/or translation. The hybridization can be by conventional nucleotide complementarity to form a stable duplex, or, for example, in the case of an antisense nucleic acid molecule that binds to DNA duplexes, through specific interactions in the major groove of the double helix. An example of a route of administration of antisense nucleic acid molecules of the invention includes direct injection at a tissue site. Alternatively, antisense nucleic acid molecules can be modified to target selected cells and then administered systemically. For example, for systemic administration, antisense molecules can be modified such that they specifically bind to receptors or antigens expressed on a selected cell surface, e.g., by linking the antisense nucleic acid molecules to peptides or antibodies that bind to cell surface receptors or antigens. The antisense nucleic acid molecules can also be delivered to cells using the vectors described herein. To achieve sufficient intracellular concentrations of antisense molecules, vector constructs in which the anti sense nucleic acid molecule is placed under the control of a strong pol II or pol III promoter are preferred.

[0096] In yet another embodiment, the antisense nucleic acid molecule of the invention is an α-anomeric nucleic acid molecule. An α-anomeric nucleic acid molecule forms specific double-stranded hybrids with complementary RNA in which, contrary to the usual β-units, the strands run parallel to each other (Gaultier el al. (1987) Nucleic Acids Res 15: 6625-6641). The antisense nucleic acid molecule can also comprise a 2′-o-methylribonucleotide (Inoue et al. (1987) Nucleic Acids Res 15: 6131-6148) or a chimeric RNA-DNA analogue (Inoue et al. (1987) FEBS Lett 215: 327-330).

[0097] 4.4 Ribozymes and PNA Moieties

[0098] In still another embodiment, an antisense nucleic acid of the invention is a ribozyme. Ribozymes are catalytic RNA molecules with ribonuclease activity that are capable of cleaving a single-stranded nucleic acid, such as an mRNA, to which they have a complementary region. Thus, ribozymes (e.g. hammerhead ribozymes (described in Haselhoff and Gerlach (1988) Nature 334:585-591)) can be used to catalytically cleave a mRNA transcripts to thereby inhibit translation of a mRNA. A ribozyme having specificity for a nucleic acid of the invention can be designed based upon the nucleotide sequence of a DNA disclosed herein (i.e. SEQ ID NO: 1-245). For example, a derivative of a Tetrahymena L-19 IVS RNA can be constructed in which the nucleotide sequence of the active site is complementary to the nucleotide sequence to be cleaved in an mRNA of SEQ ID NO: 1-245 (see, e.g., Cech et al. U.S. Pat. No. 4,987,071; and Cech et al. U.S. Pat. No. 5,116,742). Alternatively, polynucleotides of the invention can be used to select a catalytic RNA having a specific ribonuclease activity from a pool of RNA molecules. See, e.g., Bartel et al., (1993) Science 261:1411-1418.

[0099] Alternatively, gene expression can be inhibited by targeting nucleotide sequences complementary to the regulatory region (e.g., promoter and/or enhancers) to form triple helical structures that prevent transcription of the gene in target cells. See generally, Helene. (1991) Anticancer Drug Des. 6: 569-84; Helene, et al. (1992) Ann. N.Y. Acad Sci. 660:27-36; and Maher (1992) Bioassays 14: 807-15.

[0100] In various embodiments, the nucleic acids of the invention can be modified at the base moiety, sugar moiety or phosphate backbone to improve, e.g., the stability, hybridization, or solubility of the molecule. For example, the deoxyribose phosphate backbone of the nucleic acids can be modified to generate peptide nucleic acids (see Hyrup et al. (1996) Bioorg Med Chem 4: 5-23). As used herein, the terms “peptide nucleic acids” or “PNAs” refer to nucleic acid mimics, e.g., DNA mimics, in which the deoxyribose phosphate backbone is replaced by a pseudopeptide backbone and only the four natural nucleobases are retained. The neutral backbone of PNAs has been shown to allow for specific hybridization to DNA and RNA under conditions of low ionic strength. The synthesis of PNA oligomers can be performed using standard solid phase peptide synthesis protocols as described in Hyrup et al. (1996) above; Perry-O'Keefe el al. (1996) PNAS 93: 14670-675.

[0101] PNAs of the invention can be used in therapeutic and diagnostic applications. For example, PNAs can be used as antisense or antigene agents for sequence-specific modulation of gene expression by, e.g., inducing transcription or translation arrest or inhibiting replication. PNAs of the invention can also be used, e.g., in the analysis of single base pair mutations in a gene by, e.g., PNA directed PCR clamping; as artificial restriction enzymes when used in combination with other enzymes, e.g., S1 nucleases (Hyrup B. (1996) above); or as probes or primers for DNA sequence and hybridization (Hyrup et al. (1996), above; Perry-O'Keefe (1996), above).

[0102] In another embodiment. PNAs of the invention can be modified, e.g., to enhance their stability or cellular uptake, by attaching lipophilic or other helper groups to PNA, by the formation of PNA-DNA chimeras, or by the use of liposomes or other techniques of drug delivery known in the art. For example. PNA-DNA chimeras can be generated that may combine the advantageous properties of PNA and DNA. Such chimeras allow DNA recognition enzymes, e.g., RNase H and DNA polymerases, to interact with the DNA portion while the PNA portion would provide high binding affinity and specificity. PNA-DNA chimeras can be linked using linkers of appropriate lengths selected in terms of base stacking, number of bonds between the nucleobases, and orientation (Hyrup (1996) above). The synthesis of PNA-DNA chimeras can be performed as described in Hyrup (1996) above and Finn et al. (1996) Nucl Acids Res 24: 3357-63. For example, a DNA chain can be synthesized on a solid support using standard phosphoramidite coupling chemistry, and modified nucleoside analogs, e.g., 5′-(4-methoxytrityl)amino-5′-deoxy-thymidine phosphoramidite, can be used between the PNA and the 5′ end of DNA (Mag et al. (1989) Nucl Acid Res 17: 5973-88). PNA monomers are then coupled in a stepwise manner to produce a chimeric molecule with a 5′ PNA segment and a 3′ DNA segment (Finn et al. (1996) above). Alternatively, chimeric molecules can be synthesized with a 5′ DNA segment and a 3′ PNA segment. See, Petersen et al. (1975) Bioorg Med Chem Lett 5: 1119-11124.

[0103] In other embodiments, the oligonucleotide may include other appended groups such as peptides (e.g., for targeting host cell receptors in vivo), or agents facilitating transport across the cell membrane (see, e.g., Letsinger et al., 1989, Proc. Natl. Acad. Sci. U.S.A. 86:6553-6556; Lemaitre et al., 1987, Proc. Natl. Acad. Sci. 84:648-652; PCT Publication No. WO88/09810) or the blood-brain barrier (see, e.g., PCT Publication No. WO89/10134). In addition, oligonucleotides can be modified with hybridization triggered cleavage agents (See, e.g., Krol et al., 1988, BioTechniques 6:958-976) or intercalating agents. (See, e.g., Zon, 1988, Pharm. Res. 5: 539-549). To this end, the oligonucleotide may be conjugated to another molecule, e.g., a peptide, a hybridization triggered cross-linking agent, a transport agent, a hybridization-triggered cleavage agent, etc.

[0104] 4.5 Hosts

[0105] The present invention further provides host cells genetically engineered to contain the polynucleotides of the invention. For example, such host cells may contain nucleic acids of the invention introduced into the host cell using known transformation, transfection or infection methods. The present invention still further provides host cells genetically engineered to express the polynucleotides of the invention, wherein such polynucleotides are in operative association with a regulatory sequence heterologous to the host cell which drives expression of the polynucleotides in the cell.

[0106] Knowledge of nucleic acid sequences allows for modification of cells to permit, or increase, expression of endogenous polypeptide. Cells can be modified (e.g. by homologous recombination) to provide increased polypeptide expression by replacing, in whole or in part, the naturally occurring promoter with all or part of a heterologous promoter so that the cells express the polypeptide at higher levels. The heterologous promoter is inserted in such a manner that it is operatively linked to the encoding sequences. See, for example, PCT International Publication No. WO94/12650, PCT International Publication No. WO92/20808, and PCT International Publication No. WO91/09955. It is also contemplated that, in addition to heterologous promoter DNA, amplifiable marker DNA (e.g., ada, dhfr, and the multifunctional CAD gene which encodes carbamyl phosphate synthase, aspartate transcarbamylase, and dihydroorotase) and/or intron DNA may be inserted along with the heterologous promoter DNA. If linked to the coding sequence, amplification of the marker DNA by standard selection methods results in co-amplification of the desired protein coding sequences in the cells.

[0107] The host cell can be a higher eukaryotic host cell, such as a mammalian cell, a lower eukaryotic host cell, such as a yeast cell, or the host cell can be a prokaryotic cell, such as a bacterial cell. Introduction of the recombinant construct into the host cell can be effected by calcium phosphate transfection, DEAE-dextran mediated transfection, or electroporation (Davis, L. et al., Basic Methods in Molecular Biology (1986)). The host cells containing one of the polynucleotides of the invention, can be used in conventional manners to produce the gene product encoded by the isolated fragment (in the case of an ORF) or can be used to produce a heterologous protein under the control of the EMF.

[0108] Any host/vector system can be used to express one or more of the ORFs of the present invention. These include, but are not limited to, eukaryotic hosts such as HeLa cells, Cv-1 cell, COS cells, 293 cells, and Sf9 cells, as well as prokaryotic host such as E. coli and B. subtilis. The most preferred cells are those which do not normally express the particular polypeptide or protein or which expresses the polypeptide or protein at low natural level. Mature proteins can be expressed in mammalian cells, yeast, bacteria, or other cells under the control of appropriate promoters. Cell-free translation systems can also be employed to produce such proteins using RNAs derived from the DNA constructs of the present invention. Appropriate cloning and expression vectors for use with prokaryotic and eukaryotic hosts are described by Sambrook, et al., in Molecular Cloning: A Laboratory Manual, Second Edition, Cold Spring Harbor, N.Y. (1989), the disclosure of which is hereby incorporated by reference.

[0109] Various mammalian cell culture systems can also be employed to express recombinant protein. Examples of mammalian expression systems include the COS-7 lines of monkey kidney fibroblasts, described by Gluzman, Cell 23:175 (1981). Other cell lines capable of expressing a compatible vector are, for example, the C127, monkey COS cells, Chinese Hamster Ovary (CHO) cells, human kidney 293 cells, human epidermal A431 cells, human Colo205 cells, 3T3 cells, CV-1 cells, other transformed primate cell lines, normal diploid cells, cell strains derived from in vitro culture of primary tissue, primary explants, HeLa cells, mouse L cells, BHK, HL-60, U937, HaK or Jurkat cells. Mammalian expression vectors will comprise an origin of replication, a suitable promoter and also any necessary ribosome binding sites, polyadenylation site, splice donor and acceptor sites, transcriptional termination sequences, and 5′ flanking nontranscribed sequences. DNA sequences derived from the SV40 viral genome, for example, SV40 origin, early promoter, enhancer, splice, and polyadenylation sites may be used to provide the required nontranscribed genetic elements. Recombinant polypeptides and proteins produced in bacterial culture are usually isolated by initial extraction from cell pellets, followed by one or more salting-out, aqueous ion exchange or size exclusion chromatography steps. Protein refolding steps can be used, as necessary, in completing configuration of the mature protein. Finally, high performance liquid chromatography (HPLC) can be employed for final purification steps. Microbial cells employed in expression of proteins can be disrupted by any convenient method, including freeze-thaw cycling, sonication, mechanical disruption, or use of cell lysing agents.

[0110] Alternatively, it may be possible to produce the protein in lower eukaryotes such as yeast or insects or in prokaryotes such as bacteria. Potentially suitable yeast strains include Saccharomyces cerevisiae, Schizosaccharomyces pombe, Kluyveromyces strains, Candida, or any yeast strain capable of expressing heterologous proteins. Potentially suitable bacterial strains include Escherichia coli, Bacillus subtilis, Salmonella typhimurium, or any bacterial strain capable of expressing heterologous proteins. If the protein is made in yeast or bacteria, it may be necessary to modify the protein produced therein, for example by phosphorylation or glycosylation of the appropriate sites, in order to obtain the functional protein. Such covalent attachments may be accomplished using known chemical or enzymatic methods.

[0111] In another embodiment of the present invention, cells and tissues may be engineered to express an endogenous gene comprising the polynucleotides of the invention under the control of inducible regulatory elements, in which case the regulatory sequences of the endogenous gene may be replaced by homologous recombination. As described herein, gene targeting can be used to replace a gene's existing regulatory region with a regulatory sequence isolated from a different gene or a novel regulatory sequence synthesized by genetic engineering methods. Such regulatory sequences may be comprised of promoters, enhancers, scaffold-attachment regions, negative regulatory elements, transcriptional initiation sites, regulatory protein binding sites or combinations of said sequences. Alternatively, sequences which affect the structure or stability of the RNA or protein produced may be replaced, removed, added, or otherwise modified by targeting. These sequence include polyadenylation signals, mRNA stability elements, splice sites, leader sequences for enhancing or modifying transport or secretion properties of the protein, or other sequences which alter or improve the function or stability of protein or RNA molecules.

[0112] The targeting event may be a simple insertion of the regulatory sequence, placing the gene under the control of the new regulatory sequence, e.g., inserting a new promoter or enhancer or both upstream of a gene. Alternatively, the targeting event may be a simple deletion of a regulatory element, such as the deletion of a tissue-specific negative regulatory element. Alternatively, the targeting event may replace an existing element; for example, a tissue-specific enhancer can be replaced by an enhancer that has broader or different cell-type specificity than the naturally occurring elements. Here, the naturally occurring sequences are deleted and new sequences are added. In all cases, the identification of the targeting event may be facilitated by the use of one or more selectable marker genes that are contiguous with the targeting DNA, allowing for the selection of cells in which the exogenous DNA has integrated into the host cell genome. The identification of the targeting event may also be facilitated by the use of one or more marker genes exhibiting the property of negative selection, such that the negatively selectable marker is linked to the exogenous DNA, but configured such that the negatively selectable marker flanks the targeting sequence, and such that a correct homologous recombination event with sequences in the host cell genome does not result in the stable integration of the negatively selectable marker. Markers useful for this purpose include the Herpes Simplex Virus thymidine kinase (TK) gene or the bacterial xanthine-guanine phosphoribosyl-transferase (gpt) gene.

[0113] The gene targeting or gene activation techniques which can be used in accordance with this aspect of the invention are more particularly described in U.S. Pat. No. 5,272,071 to Chappel; U.S. Pat. No. 5,578,461 to Sherwin et al.; International Application No. PCT/US92/09627 (WO93/09222) by Selden et al.; and International Application No. PCT/US90/06436 (WO91/06667) by Skoultchi et al., each of which is incorporated by reference herein in its entirety.

[0114] 4.6 Polypeptides of the Invention

[0115] The isolated polypeptides of the invention include, but are not limited to, a polypeptide comprising: the amino acid sequences set forth as any one of SEQ ID NO: 246-490 or an amino acid sequence encoded by any one of the nucleotide sequences SEQ ID NO: 1-245 or the corresponding full length or mature protein. Polypeptides of the invention also include polypeptides preferably with biological or immunological activity that are encoded by: (a) a polynucleotide having and one of the nucleotide sequences set forth in SEQ ID NO: 1-245 or (b) polynucleotides encoding any one of the amino acid sequences set forth as SEQ ID NO: 246-490 or (c) polynucleotides that hybridize to the complement of the polynucleotides of either (a) or (b) under stringent hybridization conditions. The invention also provides biologically active or immunologically active variants of any of the amino acid sequences set forth as SEQ ID NO: 246-490 or the corresponding full length or mature protein; and “substantial equivalents” thereof (e.g., with at least about 65%, at least about 70%, at least about 75%, at least about 80%, at least about 85%, 86%, 87%, 88%, 89%, at least about 90%, 91%, 92%, 93%, 94%, typically at least about 95%, 96%, 97%, more typically at least about 98%, or most typically at least about 99% amino acid identity) that retain biological activity. Polypeptides encoded by allelic variants may have a similar, increased, or decreased activity compared to polypeptides comprising SEQ ID NO: 246-490.

[0116] Fragments of the proteins of the present invention which are capable of exhibiting biological activity are also encompassed by the present invention. Fragments of the protein may be in linear form or they may be cyclized using known methods, for example, as described in H. U. Saragovi, et al., Bio/Technology 10, 773-778 (1992) and in R. S. McDowell, et al., J. Amer. Chem. Soc. 114, 9245-9253 (1992), both of which are incorporated herein by reference. Such fragments may be fused to carrier molecules such as immunoglobulins for many purposes, including increasing the valency of protein binding sites.

[0117] The present invention also provides both full-length and mature forms (for example, without a signal sequence or precursor sequence) of the disclosed proteins. The protein coding sequence is identified in the sequence listing by translation of the disclosed nucleotide sequences. The mature form of such protein may be obtained by expression of a full-length polynucleotide in a suitable mammalian cell or other host cell. The sequence of the mature form of the protein is also determinable from the amino acid sequence of the full-length form. Where proteins of the present invention are membrane bound, soluble forms of the proteins are also provided. In such forms, part or all of the regions causing the proteins to be membrane bound are deleted so that the proteins are fully secreted from the cell in which they are expressed.

[0118] Protein compositions of the present invention may further comprise an acceptable carrier, such as a hydrophilic, e.g., pharmaceutically acceptable, carrier.

[0119] The present invention further provides isolated polypeptides encoded by the nucleic acid fragments of the present invention or by degenerate variants of the nucleic acid fragments of the present invention. By “degenerate variant” is intended nucleotide fragments which differ from a nucleic acid fragment of the present invention (e.g. an ORF) by nucleotide sequence but, due to the degeneracy of the genetic code, encode an identical polypeptide sequence. Preferred nucleic acid fragments of the present invention are the ORFs that encode proteins.

[0120] A variety of methodologies known in the art can be utilized to obtain any one of the isolated polypeptides or proteins of the present invention. At the simplest level, the amino acid sequence can be synthesized using commercially available peptide synthesizers. The synthetically-constructed protein sequences, by virtue of sharing primary, secondary or tertiary structural and/or conformational characteristics with proteins may possess biological properties in common therewith, including protein activity. This technique is particularly useful in producing small peptides and fragments of larger polypeptides. Fragments are useful, for example, in generating antibodies against the native polypeptide. Thus, they may be employed as biologically active or immunological substitutes for natural, purified proteins in screening of therapeutic compounds and in immunological processes for the development of antibodies.

[0121] The polypeptides and proteins of the present invention can alternatively be purified from cells which have been altered to express the desired polypeptide or protein. As used herein, a cell is said to be altered to express a desired polypeptide or protein when the cell, through genetic manipulation, is made to produce a polypeptide or protein which it normally does not produce or which the cell normally produces at a lower level. One skilled in the art can readily adapt procedures for introducing and expressing either recombinant or synthetic sequences into eukaryotic or prokaryotic cells in order to generate a cell which produces one of the polypeptides or proteins of the present invention.

[0122] The invention also relates to methods for producing a polypeptide comprising growing a culture of host cells of the invention in a suitable culture medium, and purifying the protein from the cells or the culture in which the cells are grown. For example, the methods of the invention include a process for producing a polypeptide in which a host cell containing a suitable expression vector that includes a polynucleotide of the invention is cultured under conditions that allow expression of the encoded polypeptide. The polypeptide can be recovered from the culture, conveniently from the culture medium, or from a lysate prepared from the host cells and further purified. Preferred embodiments include those in which the protein produced by such process is a full length or mature form of the protein.

[0123] In an alternative method, the polypeptide or protein is purified from bacterial cells which naturally produce the polypeptide or protein. One skilled in the art can readily follow known methods for isolating polypeptides and proteins in order to obtain one of the isolated polypeptides or proteins of the present invention. These include, but are not limited to, immunochromatography, HPLC, size-exclusion chromatography, ion-exchange chromatography, and immuno-affinity chromatography. See, e.g. Scopes. Protein Purification. Principles and Practice, Springer-Verlag (1994): Sambrook, et al. in Molecular Cloning: A Laboratory Manual; Ausubel et al., Current Protocols in Molecular Biology. Polypeptide fragments that retain biological/immunological activity include fragments comprising greater than about 100 amino acids, or greater than about 200 amino acids, and fragments that encode specific protein domains.

[0124] The purified polypeptides can be used in in vitro binding assays which are well known in the art to identify molecules which bind to the polypeptides. These molecules include but are not limited to, for e.g., small molecules, molecules from combinatorial libraries, antibodies or other proteins. The molecules identified in the binding assay are then tested for antagonist or agonist activity in in vivo tissue culture or animal models that are well known in the art. In brief, the molecules are titrated into a plurality of cell cultures or animals and then tested for either cell/animal death or prolonged survival of the animal/cells.

[0125] In addition, the peptides of the invention or molecules capable of binding to the peptides may be complexed with toxins, e.g., ricin or cholera, or with other compounds that are toxic to cells. The toxin-binding molecule complex is then targeted to a tumor or other cell by the specificity of the binding molecule for SEQ ID NO: 246-490.

[0126] The protein of the invention may also be expressed as a product of transgenic animals, e.g., as a component of the milk of transgenic cows, goats, pigs, or sheep which are characterized by somatic or germ cells containing a nucleotide sequence encoding the protein.

[0127] The proteins provided herein also include proteins characterized by amino acid sequences similar to those of purified proteins but into which modification are naturally provided or deliberately engineered. For example, modifications, in the peptide or DNA sequence, can be made by those skilled in the art using known techniques. Modifications of interest in the protein sequences may include the alteration, substitution., replacement, insertion or deletion of a selected amino acid residue in the coding sequence. For example, one or more of the cysteine residues may be deleted or replaced with another amino acid to alter the conformation of the molecule. Techniques for such alteration, substitution, replacement, insertion or deletion are well known to those skilled in the art (see, e.g., U.S. Pat. No. 4,518,584). Preferably, such alteration, substitution, replacement, insertion or deletion retains the desired activity of the protein. Regions of the protein that are important for the protein function can be determined by various methods known in the art including the alanine-scanning method which involved systematic substitution of single or strings of amino acids with alanine, followed by testing the resulting alanine-containing variant for biological activity. This type of analysis determines the importance of the substituted amino acid(s) in biological activity. Regions of the protein that are important for protein function may be determined by the eMATRIX program.

[0128] Other fragments and derivatives of the sequences of proteins which would be expected to retain protein activity in whole or in part and are useful for screening or other immunological methodologies may also be easily made by those skilled in the art given the disclosures herein. Such modifications are encompassed by the present invention.

[0129] The protein may also be produced by operably linking the isolated polynucleotide of the invention to suitable control sequences in one or more insect expression vectors, and employing an insect expression system. Materials and methods for baculovirus/insect cell expression systems are commercially available in kit form from, e.g., Invitrogen, San Diego, Calif., U.S.A. (the MaxBat™ kit), and such methods are well known in the art, as described in Summers and Smith, Texas Agricultural Experiment Station Bulletin No. 1555 (1987), incorporated herein by reference. As used herein, an insect cell capable of expressing a polynucleotide of the present invention is “transformed.”

[0130] The protein of the invention may be prepared by culturing transformed host cells under culture conditions suitable to express the recombinant protein. The resulting expressed protein may then be purified from such culture (i.e., from culture medium or cell extracts) using known purification processes, such as gel filtration and ion exchange chromatography. The purification of the protein may also include an affinity column containing agents which will bind to the protein; one or more column steps over such affinity resins as concanavalin A-agarose, heparin-toyopearl™ or Cibacrom blue 3GA Sepharose™; one or more steps involving hydrophobic interaction chromatography using such resins as phenyl ether, butyl ether, or propyl ether; or immunoaffinity chromatography.

[0131] Alternatively, the protein of the invention may also be expressed in a form which will facilitate purification. For example, it may be expressed as a fusion protein, such as those of maltose binding protein (MBP), glutathione-S-transferase (GST) or thioredoxin (TRX), or as a His tag. Kits for expression and purification of such fusion proteins are commercially available from New England BioLab (Beverly, Mass.), Pharmacia (Piscataway, N.J.) and Invitrogen, respectively. The protein can also be tagged with an epitope and subsequently purified by using a specific antibody directed to such epitope. One such epitope (“FLAG®”) is commercially available from Kodak (New Haven, Conn.).

[0132] Finally, one or more reverse-phase high performance liquid chromatography (RP-HPLC) steps employing hydrophobic RP-HPLC media, e.g., silica gel having pendant methyl or other aliphatic groups, can be employed to further purify the protein. Some or all of the foregoing purification steps, in various combinations, can also be employed to provide a substantially homogeneous isolated recombinant protein. The protein thus purified is substantially free of other mammalian proteins and is defined in accordance With the present invention as an “isolated protein.”

[0133] The polypeptides of the invention include analogs (variants). This embraces fragments, as well as peptides in which one or more amino acids has been deleted, inserted, or substituted. Also, analogs of the polypeptides of the invention embrace fusions of the polypeptides or modifications of the polypeptides of the invention, wherein the polypeptide or analog is fused to another moiety or moieties, e.g., targeting moiety or another therapeutic agent. Such analogs may exhibit improved properties such as activity and/or stability. Examples of moieties which may be fused to the polypeptide or an analog include, for example, targeting moieties which provide for the delivery of polypeptide to pancreatic cells, e.g., antibodies to pancreatic cells, antibodies to immune cells such as T-cells, monocytes, dendritic cells, granulocytes, etc., as well as receptor and ligands expressed on pancreatic or immune cells. Other moieties which may be fused to the polypeptide include therapeutic agents which are used for treatment, for example, immunosuppressive drugs such as cyclosporin, SK506, azathioprine, CD3 antibodies and steroids. Also, polypeptides may be fused to immune modulators, and other cytokines such as alpha or beta interferon.

[0134] 4.6.1 Determining Polypeptide and Polynucleotide Identity and Similarity

[0135] Preferred identity and/or similarity are designed to give the largest match between the sequences tested. Methods to determine identity and similarity are codified in computer programs including, but are not limited to, the GCG program package, including GAP (Devereux, J., et al., Nucleic Acids Research 12(1):387 (1984); Genetics Computer Group, University of Wisconsin, Madison, Wis.). BLASTP, BLASTN, BLASTX, FASTA (Altschul, S. F. et al., J. Molec. Biol. 215:403-410 (1990). PSI-BLAST (Altschul S. F. et al., Nucleic Acids Res, vol. 25, pp. 3389-3402, herein incorporated by reference), eMatrix software (Wu et al., J. Comp. Biol., Vol. 6, pp. 219-235 (1999), herein incorporated by reference), eMotif software (Nevill-Manning et al, ISMB-97, Vol. 4, pp. 202-209, herein incorporated by reference), pFam software (Sonnhammer et al., Nucleic Acids Res. Vol. 26(1), pp. 320-322 (1998), herein incorporated by reference) and the Kyte-Doolittle hydrophobocity prediction algorithm (J. Mol Biol, 157, pp. 105-31 (1982), incorporated herein by reference). The BLAST programs are publicly available from the National Center for Biotechnology Information (NCBI) and other sources (BLAST Manual, Altschul. S., et al. NCB NLM NIH Bethesda. MD 20894; Altschul, S., et al., J. Mol. Biol. 215:403-410 (1990).

[0136] 4.7 Chimeric and Fusion Proteins

[0137] The invention also provides chimeric or fusion proteins. As used herein, a “chimeric protein” or “fusion protein” comprises a polypeptide of the invention operatively linked to another polypeptide. Within a fusion protein the polypeptide according to the invention can correspond to all or a portion of a protein according to the invention. In one embodiment, a fusion protein comprises at least one biologically active portion of a protein according to the invention. In another embodiment, a fusion protein comprises at least two biologically active portions of a protein according to the invention. Within the fusion protein, the term “operatively linked” is intended to indicate that the polypeptide according to the invention and the other polypeptide are fused in-frame to each other. The polypeptide can be fused to the N-terminus or C-terminus.

[0138] For example, in one embodiment a fusion protein comprises a polypeptide according to the invention operably linked to the extracellular domain of a second protein. In another embodiment, the fusion protein is a GST-fusion protein in which the polypeptide sequences of the invention are fused to the C-terminus of the GST (i.e., glutathione S-transferase) sequences.

[0139] In another embodiment, the fusion protein is an immunoglobulin fusion protein in which the polypeptide sequences according to the invention comprise one or more domains fused to sequences derived from a member of the immunoglobulin protein family. The immunoglobulin fusion proteins of the invention can be incorporated into pharmaceutical compositions and administered to a subject to inhibit an interaction between a ligand and a protein of the invention on the surface of a cell, to thereby suppress signal transduction in vivo. The immunoglobulin fusion proteins can be used to affect the bioavailability of a cognate ligand. Inhibition of the ligand/protein interaction may be useful therapeutically for both the treatment of proliferative and differentiative disorders, e.g., cancer as well as modulating (e.g., promoting or inhibiting) cell survival. Moreover, the immunoglobulin fusion proteins of the invention can be used as immunogens to produce antibodies in a subject, to purify ligands, and in screening assays to identify molecules that inhibit the interaction of a polypeptide of the invention with a ligand.

[0140] A chimeric or fusion protein of the invention can b, produced by standard recombinant DNA techniques. For example, DNA fragments coding for the different polypeptide sequences are ligated together in-frame in accordance with conventional techniques, e.g., by employing blunt-ended or stagger-ended termini for ligation, restriction enzyme digestion to provide for appropriate termini, filling-in of cohesive ends as appropriate, alkaline phosphatase treatment to avoid undesirable joining, and enzymatic ligation. In another embodiment, the fusion gene can be synthesized by conventional techniques including automated DNA synthesizers. Alternatively, PCR amplification of gene fragments can be carried out using anchor primers that give rise to complementary overhangs between two consecutive gene fragments that can subsequently be annealed and reamplified to generate a chimeric gene sequence (see, for example, Ausubel et al. (eds.) CURRENT PROTOCOLS IN MOLECULAR BIOLOGY, John Wiley & Sons, 1992). Moreover, many expression vectors are commercially available that already encode a fusion moiety (e.g., a GST polypeptide). A nucleic acid encoding a polypeptide of the invention can be cloned into such an expression vector such that the fusion moiety is linked in-frame to the protein of the invention.

[0141] 4.8 Gene Therapy

[0142] Mutations in the polynucleotides of the invention may result in loss of normal function of the encoded protein. The invention thus provides gene therapy to restore normal activity of the polypeptides of the invention; or to treat disease states involving polypeptides of the invention. Delivery of a functional gene encoding polypeptides of the invention to appropriate cells is effected ex vivo, in situ, or in vivo by use of vectors, and more particularly viral vectors (e.g., adenovirus, adeno-associated virus, or a retrovirus), or ex vivo by use of physical DNA transfer methods (e.g., liposomes or chemical treatments). See, for example, Anderson, Nature, supplement to vol. 392, no. 6679, pp.25-20 (1998). For additional reviews of gene therapy technology see Friedmann, Science, 244: 1275-1281(1989); Verma, Scientific American: 68-84 (1990); and Miller, Nature, 357: 455-460 (1992). Introduction of any one of the nucleotides of the present invention or a gene encoding the polypeptides of the present invention can also be accomplished with extrachromosomal substrates (transient expression) or artificial chromosomes (stable expression). Cells may also be cultured ex vivo in the presence of proteins of the present invention in order to proliferate or to produce a desired effect on or activity in such cells. Treated cells can then be introduced in vivo for therapeutic purposes. Alternatively, it is contemplated that in other human disease states, preventing the expression of or inhibiting the activity of polypeptides of the invention will be useful in treating the disease states. It is contemplated that antisense therapy or gene therapy could be applied to negatively regulate the expression of polypeptides of the invention.

[0143] Other methods inhibiting expression of a protein include the introduction of antisense molecules to the nucleic acids of the present invention, their complements, or their translated RNA sequences, by methods known in the art. Further, the polypeptides of the present invention can be inhibited by using targeted deletion methods, or the insertion of a negative regulatory element such as a silencer, which is tissue specific.

[0144] The present invention still further provides cells genetically engineered in vivo to express the polynucleotides of the invention, wherein such polynucleotides are in operative association with a regulatory sequence heterologous to the host cell which drives expression of the polynucleotides in the cell. These methods can be used to increase or decrease the expression of the polynucleotides of the present invention.

[0145] Knowledge of DNA sequences provided by the invention allows for modification of cells to permit, increase, or decrease, expression of endogenous polypeptide. Cells can be modified (e.g., by homologous recombination) to provide increased polypeptide expression by replacing, in whole or in part, the naturally occurring promoter with all or part of a heterologous promoter so that the cells express the protein at higher levels. The heterologous promoter is inserted in such a manner that it is operatively linked to the desired protein encoding sequences. See, for example, PCT International Publication No. WO 94/12650, PCT International Publication No. WO 92/20808, and PCT International Publication No. WO 91/09955. It is also contemplated that, in addition to heterologous promoter DNA, amplifiable marker DNA (e.g., ada, dhfr, and the multifunctional CAD gene which encodes carbamyl phosphate synthase, aspartate transcarbamylase, and dihydroorotase) and/or intron DNA may be inserted along with the heterologous promoter DNA. If linked to the desired protein coding sequence, amplification of the marker DNA by standard selection methods results in co-amplification of the desired protein coding sequences in the cells.

[0146] In another embodiment of the present invention, cells and tissues may be engineered to express an endogenous gene comprising the polynucleotides of the invention under the control of inducible regulatory elements, in which case the regulatory sequences of the endogenous gene may be replaced by homologous recombination. As described herein, gene targeting can be used to replace a gene's existing regulatory region with a regulatory sequence isolated from a different gene or a novel regulatory sequence synthesized by genetic engineering methods. Such regulatory sequences may be comprised of promoters, enhancers, scaffold-attachment regions, negative regulatory elements, transcriptional initiation sites, regulatory protein binding sites or combinations of said sequences. Alternatively, sequences which affect the structure or stability of the RNA or protein produced may be replaced, removed, added, or otherwise modified by targeting. These sequences include polyadenylation signals, MRNA stability elements, splice sites, leader sequences for enhancing or modifying transport or secretion properties of the protein, or other sequences which alter or improve the function or stability of protein or RNA molecules.

[0147] The targeting event may be a simple insertion of the regulatory sequence, placing the gene under the control of the new regulatory sequence, e.g., inserting a new promoter or enhancer or both upstream of a gene. Alternatively, the targeting event may be a simple deletion of a regulatory element, such as the deletion of a tissue-specific negative regulatory element. Alternatively, the targeting event may replace an existing element; for example, a tissue-specific enhancer can be replaced by an enhancer that has broader or different cell-type specificity than the naturally occurring elements. Here, the naturally occurring sequences are deleted and new sequences are added. In all cases, the identification of the targeting event may be facilitated by the use of one or more selectable marker genes that are contiguous with the targeting DNA, allowing for the selection of cells in which the exogenous DNA has integrated into the cell genome. The identification of the targeting event may also be facilitated by the use of one or more marker genes exhibiting the property of negative selection, such that the negatively selectable marker is linked to the exogenous DNA, but configured such that the negatively selectable marker flanks the targeting sequence, and such that a correct homologous recombination event with sequences in the host cell genome does not result in the stable integration of the negatively selectable marker. Markers useful for this purpose include the Herpes Simplex Virus thymidine kinase (TK) gene or the bacterial xanthine-guanine phosphoribosyl-transferase (gpt) gene.

[0148] The gene targeting or gene activation techniques which can be used in accordance with this aspect of the invention are more particularly described in U.S. Pat. No. 5,272,071 to Chappel; U.S. Pat. No. 5,578,461 to Sherwin et al.; International Application No. PCT/US92/09627 (WO93/09222) by Selden et al.; and International Application No. PCT/US90/06436 (WO91/06667) by Skoultchi et al., each of which is incorporated by reference herein in its entirety.

[0149] 4.9 Transgenic Animals

[0150] In preferred methods to determine biological functions of the polypeptides of the invention in vivo, one or more genes provided by the invention are either over expressed or inactivated in the germ line of animals using homologous recombination [Capecchi, Science 244:1288-1292 (1989)]. Animals in which the gene is over expressed, under the regulatory control of exogenous or endogenous promoter elements, are known as transgenic animals. Animals in which an endogenous gene has been inactivated by homologous recombination are referred to as “knockout” animals. Knockout animals, preferably non-human mammals, can be prepared as described in U.S. Pat. No. 5,557,032, incorporated herein by reference. Transgenic animals are useful to determine the roles polypeptides of the invention play in biological processes, and preferably in disease states. Transgenic animals are useful as model systems to identify compounds that modulate lipid metabolism. Transgenic animals, preferably non-human mammals, are produced using methods as described in U.S. Pat. No. 5,489,743 and PCT Publication No. WO94/28122, incorporated herein by reference.

[0151] Transgenic animals can be prepared wherein all or part of a promoter of the polynucleotides of the invention is either activated or inactivated to alter the level of expression of the polypeptides of the invention. Inactivation can be carried out using homologous recombination methods described above. Activation can be achieved by supplementing or even replacing the homologous promoter to provide for increased protein expression. The homologous promoter can be supplemented by insertion of one or more heterologous enhancer elements known to confer promoter activation in a particular tissue.

[0152] The polynucleotides of the present invention also make possible the development, through, e.g., homologous recombination or knock out strategies, of animals that fail to express polypeptides of the invention or that express a variant polypeptide. Such animals are useful as models for studying the in vivo activities of polypeptide as well as for studying modulators of the polypeptides of the invention.

[0153] In preferred methods to determine biological functions of the polypeptides of the invention in vivo, one or more genes provided by the invention are either over expressed or inactivated in the germ line of animals using homologous recombination [Capecchi, Science 244:1288-1292 (1989)]. Animals in which the gene is over expressed, under the regulatory control of exogenous or endogenous promoter elements, are known as transgenic animals. Animals in which an endogenous gene has been inactivated by homologous recombination are referred to as “knockout” animals. Knockout animals, preferably non-human mammals, can be prepared as described in U.S. Pat. No. 5,557,032, incorporated herein by reference. Transgenic animals are useful to determine the roles polypeptides of the invention play in biological processes, and preferably in disease states. Transgenic animals are useful as model systems to identify compounds that modulate lipid metabolism. Transgenic animals, preferably non-human mammals, are produced using methods as described in U.S. Pat. No. 5,489,743 and PCT Publication No. WO94/28122, incorporated herein by reference.

[0154] Transgenic animals can be prepared wherein all or part of the polynucleotides of the invention promoter is either activated or inactivated to alter the level of expression of the polypeptides of the invention. Inactivation can be carried out using homologous recombination methods described above. Activation can be achieved by supplementing or even replacing the homologous promoter to provide for increased protein expression. The homologous promoter can be supplemented by insertion of one or more heterologous enhancer elements known to confer promoter activation in a particular tissue.

[0155] 4.10 Uses and Biological Activity

[0156] The polynucleotides and proteins of the present invention are expected to exhibit one or more of the uses or biological activities (including those associated with assays cited herein) identified herein. Uses or activities described for proteins of the present invention may be provided by administration or use of such proteins or of polynucleotides encoding such proteins (such as, for example, in gene therapies or vectors suitable for introduction of DNA). The mechanism underlying the particular condition or pathology will dictate whether the polypeptides of the invention, the polynucleotides of the invention or modulators (activators or inhibitors) thereof would be beneficial to the subject in need of treatment. Thus, “therapeutic compositions of the invention” include compositions comprising isolated polynucleotides (including recombinant DNA molecules, cloned genes and degenerate variants thereof) or polypeptides of the invention (including full length protein, mature protein and truncations or domains thereof), or compounds and other substances that modulate the overall activity of the target gene products, either at the level of target gene/protein expression or target protein activity. Such modulators include polypeptides, analogs, (variants), including fragments and fusion proteins, antibodies and other binding proteins; chemical compounds that directly or indirectly activate or inhibit the polypeptides of the invention (identified, e.g., via drug screening assays as described herein); antisense polynucleotides and polynucleotides suitable for triple helix formation; and in particular antibodies or other binding partners that specifically recognize one or more epitopes of the polypeptides of the invention.

[0157] The polypeptides of the present invention may likewise be involved in cellular activation or in one of the other physiological pathways described herein.

[0158] 4.10.1 Research Uses and Utilities

[0159] The polynucleotides provided by the present invention can be used by the research community for various purposes. The polynucleotides can be used to express recombinant protein for analysis, characterization or therapeutic use; as markers for tissues in which the corresponding protein is preferentially expressed (either constitutively or at a particular stage of tissue differentiation or development or in disease states); as molecular weight markers on gels; as chromosome markers or tags (when labeled) to identify chromosomes or to map related gene positions; to compare with endogenous DNA sequences in patients to identify potential genetic disorders; as probes to hybridize and thus discover novel, related DNA sequences; as a source of information to derive PCR primers for genetic fingerprinting; as a probe to “subtract-out” known sequences in the process of discovering other novel polynucleotides; for selecting and making oligomers for attachment to a “gene chip” or other support, including for examination of expression patterns; to raise anti-protein antibodies using DNA immunization techniques; and as an antigen to raise anti-DNA antibodies or elicit another immune response. Where the polynucleotide encodes a protein which binds or potentially binds to another protein (such as, for example, in a receptor-ligand interaction), the polynucleotide can also be used in interaction trap assays (such as, for example, that described in Gyuris et al. Cell 75:791-803 (1993)) to identify polynucleotides encoding the other protein with which binding occurs or to identify inhibitors of the binding interaction.

[0160] The polypeptides provided by the present invention can similarly be used in assays to determine biological activity, including in a panel of multiple proteins for high-throughput screening; to raise antibodies or to elicit another immune response; as a reagent (including the labeled reagent) in assays designed to quantitatively determine levels of the protein (or its receptor) in biological fluids; as markers for tissues in which the corresponding polypeptide is preferentially expressed (either constitutively or at a particular stage of tissue differentiation or development or in a disease state); and, of course, to isolate correlative receptors or ligands. Proteins involved in these binding interactions can also be used to screen for peptide or small molecule inhibitors or agonists of the binding interaction.

[0161] Any or all of these research utilities are capable of being developed into reagent grade or kit format for commercialization as research products.

[0162] Methods for performing the uses listed above are well known to those skilled in the art. References disclosing such methods include without limitation “Molecular Cloning: A Laboratory Manual”, 2d ed. Cold Spring Harbor Laboratory Press, Sambrook, J., E. F. Fritsch and T. Maniatis eds., 1989, and “Methods in Enzymology: Guide to Molecular Cloning Techniques”, Academic Press, Berger, S. L. and A. R. Kimmel eds., 1987.

[0163] 4.10.2 Nutritional Uses

[0164] Polynucleotides and polypeptides of the present invention can also be used as nutritional sources or supplements. Such uses include without limitation use as a protein or amino acid supplement, use as a carbon source, use as a nitrogen source and use as a source of carbohydrate. In such cases the polypeptide or polynucleotide of the invention can be added to the feed of a particular organism or can be administered as a separate solid or liquid preparation, such as in the form of powder, pills, solutions, suspensions or capsules. In the case of microorganisms, the polypeptide or polynucleotide of the invention can be added to the medium in or on which the microorganism is cultured.

[0165] 4.10.3 Cytokine and Cell Proliferation/Differentiation Activity

[0166] A polypeptide of the present invention may exhibit activity relating to cytokine, cell proliferation (either inducing or inhibiting) or cell differentiation (either inducing or inhibiting) activity or may induce production of other cytokines in certain cell populations. A polynucleotide of the invention can encode a polypeptide exhibiting such attributes. Many protein factors discovered to date, including all known cytokines, have exhibited activity in one or more factor-dependent cell proliferation assays, and hence the assays serve as a convenient confirmation of cytokine activity. The activity of therapeutic compositions of the present invention is evidenced by any one of a number of routine factor dependent cell proliferation assays for cell lines including, without limitation, 32D, DA2, DAIG, T10, B9, B9/11, BaF3, MC9/G, M+(preB M+), 2E8, RB5, DA1, 123, T1165, HT2, CTLL2, TF-1, Mo7e, CMK, HUVEC, and Caco. Therapeutic compositions of the invention can be used in the following:

[0167] Assays for T-cell or thymocyte proliferation include without limitation those described in: Current Protocols in Immunology, Ed by J. E. Coligan, A. M. Kruisbeek, D. H. Margulies, E. M. Shevach, W. Strober, Pub. Greene Publishing Associates and Wiley-Interscience (Chapter 3, In Vitro assays for Mouse Lymphocyte Function 3.1-3.19; Chapter 7, Immunologic studies in Humans); Takai et al., J. Immunol. 137:3494-3500, 1986; Bertagnolli et al., J. Immunol. 145:1706-1712, 1990; Bertagnolli et al., Cellular Immunology 133:327-341, 1991; Bertagnolli, et al., I. Immunol. 149:3778-3783, 1992; Bowman et al., I. Immunol. 152:1756-1761, 1994.

[0168] Assays for cytokine production and/or proliferation of spleen cells, lymph node cells or thymocytes include, without limitation, those described in: Polyclonal T cell stimulation, Kruisbeek, A. M. and Shevach, E. M. In Current Protocols in Immunology. J. E. e.a. Coligan eds. Vol 1 pp. 3.12.1-3.12.14, John Wiley and Sons, Toronto. 1994; and Measurement of mouse and human interleukin-y, Schreiber, R. D. In Current Protocols in Immunology. J. E. e.a. Coligan eds. Vol 1 pp. 6.8.1-6.8.8, John Wiley and Sons, Toronto. 1994.

[0169] Assays for proliferation and differentiation of hematopoietic and lymphopoietic cells include, without limitation, those described in: Measurement of Human and Murine Interleukin 2 and Interleukin 4, Bottomly, K., Davis, L. S. and Lipsky, P. E. In Current Protocols in Immunology. J. E. e.a. Coligan eds. Vol 1 pp. 6.3.1-6.3.12, John Wiley and Sons, Toronto. 1991; deVries et al., J. Exp. Med. 173:1205-1211, 1991. Moreau et al., Nature 336:690-692, 1988; Greenberger et al., Proc. Natl. Acad. Sci. U.S.A. 80:2931-2938, 1983; Measurement of mouse and human interleukin 6—Nordan, R. In Current Protocols in Immunology. J. E. Coligan eds. Vol 1 pp. 6.6.1-6.6.5, John Wiley and Sons. Toronto. 1991, Smith et al., Proc. Natl. Aced. Sci. U.S.A. 83:1857-1861, 1986; Measurement of human Interleukin 11—Bennett, F., Giannotti, J., Clark, S. C. and Turner, K. J. In Current Protocols in Immunology. J. E. Coligan eds. Vol 1 pp. 6.15.1 John Wiley and Sons, Toronto. 1991; Measurement of mouse and human Interleukin 9—Ciarletta, A., Giannotti, J., Clark. S. C. and Turner, K. J. In Current Protocols in Immunology. J. E. Coligan eds. Vol 1 pp. 6.13.1. John Wiley and Sons. Toronto. 1991.

[0170] Assays for T-cell clone responses to antigens (which will identify, among others, proteins that affect APC-T cell interactions as well as direct T-cell effects by measuring proliferation and cytokine production) include, without limitation, those described in: Current Protocols in Immunology, Ed by J. E. Coligan, A. M. Kruisbeek, D. H. Margulies, E. M. Shevach, W Strober. Pub. Greene Publishing Associates and Wiley-Interscience (Chapter 3, In Vitro assays for Mouse Lymphocyte Function; Chapter 6, Cytokines and their cellular receptors; Chapter 7, Immunologic studies in Humans); Weinberger et al., Proc. Natl. Acad. Sci. USA 77:6091-6095, 1980; Weinberger et al., Eur. J. Immun. 11:405-411, 1981; Takai et al., J. Immunol. 137:3494-3500, 1986; Takai et al., J. Immunol. 140:508-512. 1988.

[0171] 4.10.4 Stem Cell Growth Factor Activity

[0172] A polypeptide of the present invention may exhibit stem cell growth factor activity and be involved in the proliferation, differentiation and survival of pluripotent and totipotent stem cells including primordial germ cells, embryonic stem cells, hematopoietic stem cells and/or germ line stem cells. Administration of the polypeptide of the invention to stem cells in vivo or ex vivo is expected to maintain and expand cell populations in a totipotential or pluripotential state which would be useful for re-engineering damaged or diseased tissues, transplantation, manufacture of bio-pharmaceuticals and the development of bio-sensors. The ability to produce large quantities of human cells has important working applications for the production of human proteins which currently must be obtained from non-human sources or donors, implantation of cells to treat diseases such as Parkinson's, Alzheimer's and other neurodegenerative diseases; tissues for grafting such as bone marrow, skin, cartilage, tendons, bone, muscle (including cardiac muscle), blood vessels, cornea, neural cells, gastrointestinal cells and others; and organs for transplantation such as kidney, liver, pancreas (including islet cells), heart and lung.

[0173] It is contemplated that multiple different exogenous growth factors and/or cytokines may be administered in combination with the polypeptide of the invention to achieve the desired effect, including any of the growth factors listed herein, other stem cell maintenance factors, and specifically including stem cell factor (SCF), leukemia inhibitory factor (LIF), Flt-3 ligand (Flt-3L), any of the interleukins, recombinant soluble IL-6 receptor fused to IL-6, macrophage inflammatory protein 1-alpha (MIP-1-alpha), G-CSF, GM-CSF, thrombopoietin (TPO), platelet factor 4 (PF-4), platelet-derived growth factor (PDGF), neural growth factors and basic fibroblast growth factor (bFGF).

[0174] Since totipotent stem cells can give rise to virtually any mature cell type, expansion of these cells in culture will facilitate the production of large quantities of mature cells. Techniques for culturing stem cells are known in the art and administration of polypeptides of the invention, optionally with other growth factors and/or cytokines, is expected to enhance the survival and proliferation of the stem cell populations. This can be accomplished by direct administration of the polypeptide of the invention to the culture medium. Alternatively, stroma cells transfected with a polynucleotide that encodes for the polypeptide of the invention can be used as a feeder layer for the stem cell populations in culture or in vivo. Stromal support cells for feeder layers may include embryonic bone marrow fibroblasts, bone marrow stromal cells, fetal liver cells, or cultured embryonic fibroblasts (see U.S. Pat. No. 5,690,926).

[0175] Stem cells themselves can be transfected with a polynucleotide of the invention to induce autocrine expression of the polypeptide of the invention. This will allow for generation of undifferentiated totipotential/pluripotential stem cell lines that are useful as is or that can then be differentiated into the desired mature cell types. These stable cell lines can also serve as a source of undifferentiated totipotential/pluripotential mRNA to create cDNA libraries and templates for polymerase chain reaction experiments. These studies would allow for the isolation and identification of differentially expressed genes in stem cell populations that regulate stem cell proliferation and/or maintenance.

[0176] Expansion and maintenance of totipotent stem cell populations will be useful in the treatment of many pathological conditions. For example, polypeptides of the present invention may be used to manipulate stem cells in culture to give rise to neuroepithelial cells that can be used to augment or replace cells damaged by illness, autoimmune disease, accidental damage or genetic disorders. The polypeptide of the invention may be useful for inducing the proliferation of neural cells and for the regeneration of nerve and brain tissue, i.e. for the treatment of central and peripheral nervous system diseases and neuropathies, as well as mechanical and traumatic disorders which involve degeneration, death or trauma to neural cells or nerve tissue. In addition, the expanded stem cell populations can also be genetically altered for gene therapy purposes and to decrease host rejection of replacement tissues after grafting or implantation.

[0177] Expression of the polypeptide of the invention and its effect on stem cells can also be manipulated to achieve controlled differentiation of the stem cells into more differentiated cell types. A broadly applicable method of obtaining pure populations of a specific differentiated cell type from undifferentiated stem cell populations involves the use of a cell-type specific promoter driving a selectable marker. The selectable marker allows only cells of the desired type to survive. For example, stem cells can be induced to differentiate into cardiomyocytes (Wobus et al. Differentiation, 48: 173-182, (1991); Klug et al., J. Clin. Invest. 98(1): 216-224, (1998)) or skeletal muscle cells (Browder, L. W. In: Principles of Tissue Engineering eds. Lanza et al., Academic Press (1997)). Alternatively, directed differentiation of stem cells can be accomplished by culturing the stem cells in the presence of a differentiation factor such as retinoic acid and an antagonist of the polypeptide of the invention which would inhibit the effects of endogenous stem cell factor activity and allow differentiation to proceed.

[0178] In vitro cultures of stem cells can be used to determine if the polypeptide of the invention exhibits stem cell growth factor activity. Stem cells are isolated from any one of various cell sources (including hematopoietic stem cells and embryonic stem cells) and cultured on a feeder layer, as described by Thompson et al. Proc. Natl. Acad. Sci, U.S.A., 92: 7844-7848 (1995), in the presence of the polypeptide of the invention alone or in combination with other growth factors or cytokines. The ability of the polypeptide of the invention to induce stem cells proliferation is determined by colony formation on semi-solid support e.g. as described by Bernstein et al., Blood, 77: 2316-2321 (1991).

[0179] 4.10.5 Hematopoiesis Regulating Activity

[0180] A polypeptide of the present invention may be involved in regulation of hematopoiesis and, consequently, in the treatment of myeloid or lymphoid cell disorders. Even marginal biological activity in support of colony forming cells or of factor-dependent cell lines indicates involvement in regulating hematopoiesis, e.g. in supporting the growth and proliferation of erythroid progenitor cells alone or in combination with other cytokines, thereby indicating utility, for example, in treating various anemias or for use in conjunction with irradiation/chemotherapy to stimulate the production of erythroid precursors and/or erythroid cells; in supporting the growth and proliferation of myeloid cells such as granulocytes and monocytes/macrophages (i.e., traditional CSF activity) useful, for example, in conjunction with chemotherapy to prevent or treat consequent myelo-suppression; in supporting the growth and proliferation of megakaryocytes and consequently of platelets thereby allowing prevention or treatment of various platelet disorders such as thrombocytopenia, and generally for use in place of or complimentary to platelet transfusions; and/or in supporting the growth and proliferation of hematopoietic stem cells which are capable of maturing to any and all of the above-mentioned hematopoietic cells and therefore find therapeutic utility in various stem cell disorders (such as those usually treated with transplantation, including, without limitation, aplastic anemia and paroxysmal nocturnal hemoglobinuria), as well as in repopulating the stem cell compartment post irradiation/chemotherapy, either in-vivo or ex-vivo (i.e., in conjunction with bone marrow transplantation or with peripheral progenitor cell transplantation (homologous or heterologous)) as normal cells or genetically manipulated for gene therapy.

[0181] Therapeutic compositions of the invention can be used in the following:

[0182] Suitable assays for proliferation and differentiation of various hematopoietic lines are cited above.

[0183] Assays for embryonic stem cell differentiation (which will identify, among others, proteins that influence embryonic differentiation hematopoiesis) include, without limitation, those described in: Johansson et al. Cellular Biology 15:141-151. 1995: Keller et al., Molecular and Cellular Biology 13:473-486. 1993: McClanahan et al. Blood 81:2903-2915, 1993.

[0184] Assays for stem cell survival and differentiation (which will identify, among others, proteins that regulate lympho-hematopoiesis) include, without limitation, those described in: Methylcellulose colony forming assays. Freshney, M. G. In Culture of Hematopoietic Cells. R. I. Freshney, et al. eds. Vol pp. 265-268, Wiley-Liss, Inc., New York, N.Y. 1994; Hirayama et al., Proc. Natl. Acad. Sci. USA 89:5907-5911. 1992; Primitive hematopoietic colony forming cells with high proliferative potential, McNiece, I. K. and Briddell, R. A. In Culture of Hematopoietic Cells. R. I. Freshney, et al. eds. Vol pp. 23-39, Wiley-Liss, Inc., New York, N.Y. 1994; Neben et al., Experimental Hematology 22:353-359, 1994; Cobblestone area forming cell assay, Ploemacher, R. E. In Culture of Hematopoietic Cells. R. I. Freshney, et al. eds. Vol pp. 1-21, Wiley-Liss, Inc., New York, N.Y. 1994; Long term bone marrow cultures in the presence of stromal cells, Spooncer, E., Dexter, M. and Allen, T. In Culture of Hematopoietic Cells. R. I. Freshney, et al. eds. Vol pp. 163-179, Wiley-Liss, Inc., New York, N.Y. 1994; Long term culture initiating cell assay, Sutherland, H. J. In Culture of Hematopoietic Cells. R. I. Freshney, et al. eds. Vol pp. 139-162, Wiley-Liss, Inc., New York, N.Y. 1994.

[0185] 4.10.6 Tissue Growth Activity

[0186] A polypeptide of the present invention also may be involved in bone, cartilage, tendon, ligament and/or nerve tissue growth or regeneration, as well as in wound healing and tissue repair and replacement, and in healing of burns, incisions and ulcers.

[0187] A polypeptide of the present invention which induces cartilage and/or bone growth in circumstances where bone is not normally formed, has application in the healing of bone fractures and cartilage damage or defects in humans and other animals. Compositions of a polypeptide, antibody, binding partner, or other modulator of the invention may have prophylactic use in closed as well as open fracture reduction and also in the improved fixation of artificial joints. De novo bone formation induced by an osteogenic agent contributes to the repair of congenital, trauma induced, or oncologic resection induced craniofacial defects, and also is useful in cosmetic plastic surgery.

[0188] A polypeptide of this invention may also be involved in attracting bone-forming cells, stimulating growth of bone-forming cells, or inducing differentiation of progenitors of bone-forming cells. Treatment of osteoporosis, osteoarthritis, bone degenerative disorders, or periodontal disease, such as through stimulation of bone and/or cartilage repair or by blocking inflammation or processes of tissue destruction (collagenase activity, osteoclast activity, etc.) mediated by inflammatory processes may also be possible using the composition of the invention.

[0189] Another category of tissue regeneration activity that may involve the polypeptide of the present invention is tendon/ligament formation. Induction of tendon/ligament-like tissue or other tissue formation in circumstances where such tissue is not normally formed, has application in the healing of tendon or ligament tears, deformities and other tendon or ligament defects in humans and other animals. Such a preparation employing a tendon/ligament-like tissue inducing protein may have prophylactic use in preventing damage to tendon or ligament tissue, as well as use in the improved fixation of tendon or ligament to bone or other tissues, and in repairing defects to tendon or ligament tissue. De novo tendon/ligament-like tissue formation induced by a composition of the present invention contributes to the repair of congenital, trauma induced, or other tendon or ligament defects of other origin, and is also useful in cosmetic plastic surgery for attachment or repair of tendons or ligaments. The compositions of the present invention may provide environment to attract tendon- or ligament-forming cells, stimulate growth of tendon- or ligament-forming cells, induce differentiation of progenitors of tendon- or ligament-forming cells, or induce growth of tendon/ligament cells or progenitors ex vivo for return in vivo to effect tissue repair. The compositions of the invention may also be useful in the treatment of tendinitis, carpal tunnel syndrome and other tendon or ligament defects. The compositions may also include an appropriate matrix and/or sequestering agent as a carrier as is well known in the art.

[0190] The compositions of the present invention may also be useful for proliferation of neural cells and for regeneration of nerve and brain tissue, i.e. for the treatment of central and peripheral nervous system diseases and neuropathies, as well as mechanical and traumatic disorders, which involve degeneration, death or trauma to neural cells or nerve tissue. More specifically, a G composition may be used in the treatment of diseases of the peripheral nervous system, such as peripheral nerve injuries, peripheral neuropathy and localized neuropathies, and central nervous system diseases, such as Alzheimer's, Parkinson's disease, Huntington's disease, amyotrophic lateral sclerosis, and Shy-Drager syndrome. Further conditions which may be treated in accordance with the present invention include mechanical and traumatic disorders, such as spinal cord disorders, head trauma and cerebrovascular diseases such as stroke. Peripheral neuropathies resulting from chemotherapy or other medical therapies may also be treatable using a composition of the invention.

[0191] Compositions of the invention may also be useful to promote better or faster closure of non-healing wounds, including without limitation pressure ulcers, ulcers associated with vascular insufficiency, surgical and traumatic wounds, and the like.

[0192] Compositions of the present invention may also be involved in the generation or regeneration of other tissues, such as organs (including, for example, pancreas, liver, intestine, kidney, skin, endothelium), muscle (smooth, skeletal or cardiac) and vascular (including vascular endothelium) tissue, or for promoting the growth of cells comprising such tissues. Part of the desired effects may be by inhibition or modulation of fibrotic scarring may allow normal tissue to regenerate. A polypeptide of the present invention may also exhibit angiogenic activity.

[0193] A composition of the present invention may also be useful for gut protection or regeneration and treatment of lung or liver fibrosis, reperfusion injury in various tissues, and conditions resulting from systemic cytokine damage.

[0194] A composition of the present invention may also be useful for promoting or inhibiting differentiation of tissues described above from precursor tissues or cells; or for inhibiting the growth of tissues described above.

[0195] Therapeutic compositions of the invention can be used in the following:

[0196] Assays for tissue generation activity include, without limitation, those described in: International Patent Publication No. WO95/16035 (bone, cartilage, tendon); International Patent Publication No. WO95/05846 (nerve, neuronal); International Patent Publication No. WO91/07491 (skin, endothelium).

[0197] Assays for wound healing activity include, without limitation, those described in: Winter, Epidermal Wound Healing, pps. 71-112 (Maibach, H. I. and Rovee, D. T., eds.), Year Book Medical Publishers, Inc., Chicago, as modified by Eaglstein and Mertz, J. Invest. Dermatol 71:382-84 (1978).

[0198] 4.10.7 Immune Stimulating or Suppressing Activity

[0199] A polypeptide of the present invention may also exhibit immune stimulating or immune suppressing activity, including without limitation the activities for which assays are described herein. A polynucleotide of the invention can encode a polypeptide exhibiting such activities. A protein may be useful in the treatment of various immune deficiencies and disorders (including severe combined immunodeficiency (SCID)), e.g., in regulating (up or down) growth and proliferation of T and/or B lymphocytes, as well as effecting the cytolytic activity of NK cells and other cell populations. These immune deficiencies may be genetic or be caused by viral (e.g., HIV) as well as bacterial or fungal infections, or may result from autoimmune disorders. More specifically, infectious diseases causes by viral, bacterial, fungal or other infection may be treatable using a protein of the present invention, including infections by HIV, hepatitis viruses, herpes viruses, mycobacteria, Leishmania spp, malaria spp, and various fungal infections such as candidiasis. Of course, in this regard, proteins of the present invention may also be useful where a boost to the immune system generally may be desirable, i.e. in the treatment of cancer.

[0200] Autoimmune disorders which may be treated using a protein of the present invention include, for example, connective tissue disease, multiple sclerosis, systemic lupus erythematosus, rheumatoid arthritis, autoimmune pulmonary inflammation. Guillain-Barre syndrome, autoimmune thyroiditis, insulin dependent diabetes mellitis, myasthenia gravis, graft-versus-host disease and autoimmune inflammatory eye disease. Such a protein (or antagonists thereof, including antibodies) of the present invention may also to be useful in the treatment of allergic reactions and conditions (e.g., anaphylaxis, serum sickness, drug reactions, food allergies, insect venom allergies, mastocytosis, allergic rhinitis, hypersensitivity pneumonitis, urticaria, angioedema, eczema, atopic dermatitis, allergic contact dermatitis, erythema multiforme, Stevens-Johnson syndrome, allergic conjunctivitis, atopic keratoconjunctivitis, venereal keratoconjunctivitis, giant papillary conjunctivitis and contact allergies), such as asthma (particularly allergic asthma) or other respiratory problems. Other conditions, in which immune suppression is desired (including, for example, organ transplantation), may also be treatable using a protein (or antagonists thereof) of the present invention. The therapeutic effects of the polypeptides or antagonists thereof on allergic reactions can be evaluated by in vivo animals models such as the cumulative contact enhancement test (Lastbom et al., Toxicology 125: 59-66, 1998), skin prick test (Hoffmann et al., Allergy 54: 446-54. 1999), guinea pig skin sensitization test (Vohr et al., Arch. Toxocol. 73: 501-9), and murine local lymph node assay (Kimber et al., J. Toxicol. Environ. Health 53: 563-79).

[0201] Using the proteins of the invention it may also be possible to modulate immune responses, in a number of ways. Down regulation may be in the form of inhibiting or blocking an immune response already in progress or may involve preventing the induction of an immune response. The functions of activated T cells may be inhibited by suppressing T cell responses or by inducing specific tolerance in T cells, or both. Immunosuppression of T cell responses is generally an active, non-antigen-specific, process which requires continuous exposure of the T cells to the suppressive agent. Tolerance, which involves inducing non-responsiveness or anergy in T cells, is distinguishable from immunosuppression in that it is generally antigen-specific and persists after exposure to the tolerizing agent has ceased. Operationally, tolerance can be demonstrated by the lack of a T cell response upon reexposure to specific antigen in the absence of the tolerizing agent.

[0202] Down regulating or preventing one or more antigen functions (including without limitation B lymphocyte antigen functions (such as, for example, B7)), e.g., preventing high level lymphokine synthesis by activated T cells, will be useful in situations of tissue, skin and organ transplantation and in graft-versus-host disease (GVHD). For example, blockage of T cell function should result in reduced tissue destruction in tissue transplantation. Typically, in tissue transplants, rejection of the transplant is initiated through its recognition as foreign by T cells, followed by an immune reaction that destroys the transplant. The administration of a therapeutic composition of the invention may prevent cytokine synthesis by immune cells, such as T cells, and thus acts as an immunosuppressant. Moreover, a lack of costimulation may also be sufficient to anergize the T cells, thereby inducing tolerance in a subject. Induction of long-term tolerance by B lymphocyte antigen-blocking reagents may avoid the necessity of repeated administration of these blocking reagents. To achieve sufficient immunosuppression or tolerance in a subject, it may also be necessary to block the function of a combination of B lymphocyte antigens.

[0203] The efficacy of particular therapeutic compositions in preventing organ transplant rejection or GVHD can be assessed using animal models that are predictive of efficacy in humans. Examples of appropriate systems which can be used include allogeneic cardiac grafts in rats and xenogeneic pancreatic islet cell grafts in mice, both of which have been used to examine the immunosuppressive effects of CTLA41 g fusion proteins in vivo as described in Lenschow et al., Science 257:789-792 (1992) and Turka et al., Proc. Natl. Acad. Sci USA, 89:11102-11105 (1992). In addition, murine models of GVHD (see Paul ed., Fundamental Immunology, Raven Press. New York, 1989, pp. 846-847) can be used to determine the effect of therapeutic compositions of the invention on the development of that disease.

[0204] Blocking antigen function may also be therapeutically useful for treating autoimmune diseases. Many autoimmune disorders are the result of inappropriate activation of T cells that are reactive against self tissue and which promote the production of cytokines and autoantibodies involved in the pathology of the diseases. Preventing the activation of autoreactive T cells may reduce or eliminate disease symptoms. Administration of reagents which block stimulation of T cells can be used to inhibit T cell activation and prevent production of autoantibodies or T cell-derived cytokines which may be involved in the disease process. Additionally, blocking reagents may induce antigen-specific tolerance of autoreactive T cells which could lead to long-term relief from the disease. The efficacy of blocking reagents in preventing or alleviating autoimmune disorders can be determined using a number of well-characterized animal models of human autoimmune diseases. Examples include murine experimental autoimmune encephalitis, systemic lupus erythmatosis in MRL/lpr/lpr mice or NZB hybrid mice, murine autoimmune collagen arthritis, diabetes mellitus in NOD mice and BB rats, and murine experimental myasthenia gravis (see Paul ed., Fundamental Immunology. Raven Press, New York, 1989, pp. 840-856).

[0205] Upregulation of an antigen function (e.g. a B lymphocyte antigen function), as a means of up regulating immune responses, may also be useful in therapy. Upregulation of immune responses may be in the form of enhancing an existing immune response or eliciting an initial immune response. For example, enhancing an immune response may be useful in cases of viral infection, including systemic viral diseases such as influenza, the common cold, and encephalitis.

[0206] Alternatively, anti-viral immune responses may be enhanced in an infected patient by removing T cells from the patient, costimulating the T cells in vitro with viral antigen-pulsed APCs either expressing a peptide of the present invention or together with a stimulatory form of a soluble peptide of the present invention and reintroducing the in vitro activated T cells into the patient. Another method of enhancing anti-viral immune responses would be to isolate infected cells from a patient, transfect them with a nucleic acid encoding a protein of the present invention as described herein such that the cells express all or a portion of the protein on their surface, and reintroduce the transfected cells into the patient. The infected cells would now be capable of delivering a costimulatory signal to, and thereby activate, T cells in vivo.

[0207] A polypeptide of the present invention may provide the necessary stimulation signal to T cells to induce a T cell mediated immune response against the transfected tumor cells. In addition, tumor cells which lack MHC class I or MHC class II molecules, or which fail to reexpress sufficient mounts of MHC class I or MHC class II molecules, can be transfected with nucleic acid encoding all or a portion of (e.g., a cytoplasmic-domain truncated portion) of an MHC class I alpha chain protein and P2 microglobulin protein or an MHC class II alpha chain protein and an MHC class II beta chain protein to thereby express MHC class I or MHC class II proteins on the cell surface. Expression of the appropriate class I or class II MHC in conjunction with a peptide having the activity of a B lymphocyte antigen (e.g., B7-1, B7-2, B7-3) induces a T cell mediated immune response against the transfected tumor cell. Optionally, a gene encoding an antisense construct which blocks expression of an MHC class II associated protein, such as the invariant chain, can also be cotransfected with a DNA encoding a peptide having the activity of a B lymphocyte antigen to promote presentation of tumor associated antigens and induce tumor specific immunity. Thus, the induction of a T cell mediated immune response in a human subject may be sufficient to overcome tumor-specific tolerance in the subject.

[0208] The activity of a protein of the invention may, among other means, be measured by the following methods:

[0209] Suitable assays for thymocyte or splenocyte cytotoxicity include, without limitation, those described in: Current Protocols in Immunology, Ed by J. E. Coligan, A. M. Kruisbeek, D. H. Margulies, E. M. Shevach, W. Strober, Pub. Greene Publishing Associates and Wiley-Interscience (Chapter 3. In Vitro assays for Mouse Lymphocyte Function 3.1-3.19; Chapter 7. Immunologic studies in Humans); Herrmann et al. Proc. Natl. Acad. Sci. USA 78:2488-2492. 1981; Herrmann et al. J. Immunol. 128:1968-1974. 1982: Handa et al., J. Immunol. 135:1564-1572, 1985: Takai et al., I. Immunol. 137:3494-3500. 1986: Takai et al., J. Immunol. 140:508-512, 1988; Bowman et al. J. Virology 61:1992-1998: Bertagnolli et al., Cellular Immunology 133:327-341, 1991: Brown et al., J. Immunol. 153:3079-3092, 1994.

[0210] Assays for T-cell-dependent immunoglobulin responses and isotype switching (which will identify, among others, proteins that modulate T-cell dependent antibody responses and that affect Th1/Th2 profiles) include, without limitation, those described in: Maliszewski, J. Immunol. 144:3028-3033, 1990; and Assays for B cell function: In vitro antibody production, Mond, J. J. and Brunswick, M. In Current Protocols in Immunology. J. E. e.a. Coligan eds. Vol 1 pp. 3.8.1-3.8.16, John Wiley and Sons, Toronto. 1994.

[0211] Mixed lymphocyte reaction (MLR) assays (which will identify, among others, proteins that generate predominantly Th1 and CTL responses) include, without limitation, those described in: Current Protocols in Immunology, Ed by J. E. Coligan, A. M. Kruisbeek, D. H. Margulies, E. M. Shevach, W. Strober, Pub. Greene Publishing Associates and Wiley-Interscience (Chapter 3, In Vitro assays for Mouse Lymphocyte Function 3.1-3.19; Chapter 7, Immunologic studies in Humans); Takai et al., J. Immunol. 137:3494-3500, 1986; Takai et al., J. Immunol. 140:508-512, 1988; Bertagnolli et al., J. Immunol. 149:3778-3783, 1992.

[0212] Dendritic cell-dependent assays (which will identify, among others, proteins expressed by dendritic cells that activate naive T-cells) include, without limitation, those described in: Guery et al., J. Immunol. 134:536-544, 1995; Inaba et al., Journal of Experimental Medicine 173:549-559, 1991; Macatonia et al., Journal of Immunology 154:5071-5079, 1995; Porgador et al., Journal of Experimental Medicine 182:255-260, 1995; Nair et al., Journal of Virology 67:4062-4069, 1993; Huang et al., Science 264:961-965, 1994; Macatonia et al., Journal of Experimental Medicine 169:1255-1264, 1989; Bhardwaj et al., Journal of Clinical Investigation 94:797-807, 1994; and Inaba et al., Journal of Experimental Medicine 172:631-640, 1990.

[0213] Assays for lymphocyte survival/apoptosis (which will identify, among others, proteins that prevent apoptosis after superantigen induction and proteins that regulate lymphocyte homeostasis) include, without limitation, those described in: Darzynkiewicz et al., Cytometry 13:795-808, 1992; Gorczyca et al., Leukemia 7:659-670. 1993; Gorczyca et al., Cancer Research 53:1945-1951, 1993; Itoh et al., Cell 66:233-243, 1991: Zacharchuk, Journal of Immunology 145:4037-4045, 1990; Zamai et al., Cytometry 14:891-897. 1993; Gorczyca et al., International Journal of Oncology 1:639-648, 1992.

[0214] Assays for proteins that influence early steps of T-cell commitment and development include, without limitation, those described in: Antica et al. Blood 84:111-117, 1994; Fine et al., Cellular Immunology 155:111-122. 1994; Galy et al. Blood 85:2770-2778, 1995; Toki et al. Proc. Nat. Acad Sci. USA 88:7548-7551, 1991.

[0215] 4.10.8 Activin/Inhibin Activity

[0216] A polypeptide of the present invention may also exhibit activin- or inhibin-related activities. A polynucleotide of the invention may encode a polypeptide exhibiting such characteristics. Inhibins are characterized by their ability to inhibit the release of follicle stimulating hormone (FSH), while activins and are characterized by their ability to stimulate the release of follicle stimulating hormone (FSH). Thus, a polypeptide of the present invention, alone or in heterodimers with a member of the inhibin family, may be useful as a contraceptive based on the ability of inhibins to decrease fertility in female mammals and decrease spermatogenesis in male mammals. Administration of sufficient amounts of other inhibins can induce infertility in these mammals. Alternatively, the polypeptide of the invention, as a homodimer or as a heterodimer with other protein subunits of the inhibin group, may be useful as a fertility inducing therapeutic, based upon the ability of activin molecules in stimulating FSH from cells of the anterior pituitary. See, for example, U.S. Pat. No. 4,798,885. A polypeptide of the invention may also be useful for advancement of the onset of fertility in sexually immature mammals, so as to increase the lifetime reproductive performance of domestic animals such as, but not limited to, cows, sheep and pigs.

[0217] The activity of a polypeptide of the invention may, among other means, be measured by the following methods.

[0218] Assays for activin/inhibin activity include, without limitation, those described in: Vale et al., Endocrinology 91:562-572, 1972; Ling et al. Nature 321:779-782, 1986; Vale et al., Nature 321:776-779, 1986; Mason et al., Nature 318:659-663, 1985; Forage et al., Proc. Natl. Acad. Sci. USA 83:3091-3095, 1986.

[0219] 4.10.9 Chemotactic/Chemokinetic Activity

[0220] A polypeptide of the present invention may be involved in chemotactic or chemokinetic activity for mammalian cells, including, for example, monocytes, fibroblasts, neutrophils, T-cells, mast cells, eosinophils, epithelial and/or endothelial cells. A polynucleotide of the invention can encode a polypeptide exhibiting such attributes. Chemotactic and chemokinetic receptor activation can be used to mobilize or attract a desired cell population to a desired site of action. Chemotactic or chemokinetic compositions (e.g. proteins, antibodies, binding partners, or modulators of the invention) provide particular advantages in treatment of wounds and other trauma to tissues, as well as in treatment of localized infections. For example, attraction of lymphocytes, monocytes or neutrophils to tumors or sites of infection may result in improved immune responses against the tumor or infecting agent.

[0221] A protein or peptide has chemotactic activity for a particular cell population if it can stimulate, directly or indirectly, the directed orientation or movement of such cell population. Preferably, the protein or peptide has the ability to directly stimulate directed movement of cells. Whether a particular protein has chemotactic activity for a population of cells can be readily determined by employing such protein or peptide in any known assay for cell chemotaxis.

[0222] Therapeutic compositions of the invention can be used in the following:

[0223] Assays for chemotactic activity (which will identify proteins that induce or prevent chemotaxis) consist of assays that measure the ability of a protein to induce the migration of cells across a membrane as well as the ability of a protein to induce the adhesion of one cell population to another cell population. Suitable assays for movement and adhesion include, without limitation, those described in: Current Protocols in Immunology, Ed by J. E. Coligan, A. M. Kruisbeek, D. H. Marguiles, E. M. Shevach, W. Strober, Pub. Greene Publishing Associates and Wiley-Interscience (Chapter 6.12, Measurement of alpha and beta Chemokines 6.12.1-6.12.28; Taub et al. J. Clin. Invest. 95:1370-1376, 1995; Lind et al. APMIS 103:140-146, 1995; Muller et al Eur. J. Immunol. 25:1744-1748; Gruber et al. J. of Immunol. 152:5860-5867, 1994; Johnston et al. J. of Immunol. 153:1762-1768, 1994.

[0224] 4.10.10 Hemostatic and Thrombolytic Activity

[0225] A polypeptide of the invention may also be involved in hemostasis or thrombolysis or thrombosis. A polynucleotide of the invention can encode a polypeptide exhibiting such attributes. Compositions may be useful in treatment of various coagulation disorders (including hereditary disorders, such as hemophilias) or to enhance coagulation and other hemostatic events in treating wounds resulting from trauma, surgery or other causes. A composition of the invention may also be useful for dissolving or inhibiting formation of thromboses and for treatment and prevention of conditions resulting therefrom (such as, for example, infarction of cardiac and central nervous system vessels (e.g., stroke).

[0226] Therapeutic compositions of the invention can be used in the following:

[0227] Assay for hemostatic and thrombolytic activity include, without limitation, those described in: Linet et al. J. Clin. Pharmacol. 26:131-140, 1986; Burdick et al., Thrombosis Res. 45:413-419, 1987; Humphrey et al. Fibrinolysis 5:71-79 (1991); Schaub, Prostaglandins 35:467-474. 1988.

[0228] 4.10.11 Cancer Diagnosis and Therapy

[0229] Polypeptides of the invention may be involved in cancer cell generation, proliferation or metastasis. Detection of the presence or amount of polynucleotides or polypeptides of the invention may be useful for the diagnosis and/or prognosis of one or more types of cancer. For example, the presence or increased expression of a polynucleotide/polypeptide of the invention may indicate a hereditary risk of cancer, a precancerous condition, or an ongoing malignancy. Conversely, a defect in the gene or absence of the polypeptide may be associated with a cancer condition. Identification of single nucleotide polymorphisms associated with cancer or a predisposition to cancer may also be useful for diagnosis or prognosis.

[0230] Cancer treatments promote tumor regression by inhibiting tumor cell proliferation, inhibiting angiogenesis (growth of new blood vessels that is necessary to support tumor growth) and/or prohibiting metastasis by reducing tumor cell motility or invasiveness. Therapeutic compositions of the invention may be effective in adult and pediatric oncology including in solid phase tumors/malignancies, locally advanced tumors, human soft tissue sarcomas, metastatic cancer, including lymphatic metastases, blood cell malignancies including multiple myeloma, acute and chronic leukemias, and lymphomas, head and neck cancers including mouth cancer, larynx cancer and thyroid cancer, lung cancers including small cell carcinoma and non-small cell cancers, breast cancers including small cell carcinoma and ductal carcinoma, gastrointestinal cancers including esophageal cancer, stomach cancer, colon cancer, colorectal cancer and polyps associated with colorectal neoplasia, pancreatic cancers, liver cancer, urologic cancers including bladder cancer and prostate cancer, malignancies of the female genital tract including ovarian carcinoma, uterine (including endometrial) cancers, and solid tumor in the ovarian follicle, kidney cancers including renal cell carcinoma, brain cancers including intrinsic brain tumors, neuroblastoma, astrocytic brain tumors, gliomas, metastatic tumor cell invasion in the central nervous system, bone cancers including osteomas, skin cancers including malignant melanoma, tumor progression of human skin keratinocytes, squamous cell carcinoma, basal cell carcinoma, hemangiopericytoma and Karposi's sarcoma.

[0231] Polypeptides, polynucleotides, or modulators of polypeptides of the invention (including inhibitors and stimulators of the biological activity of the polypeptide of the invention) may be administered to treat cancer. Therapeutic compositions can be administered in therapeutically effective dosages alone or in combination with adjuvant cancer therapy such as surgery, chemotherapy, radiotherapy, thermotherapy, and laser therapy, and may provide a beneficial effect, e.g. reducing tumor size, slowing rate of tumor growth, inhibiting metastasis, or otherwise improving overall clinical condition, without necessarily eradicating the cancer.

[0232] The composition can also be administered in therapeutically effective amounts as a portion of an anti-cancer cocktail. An anti-cancer cocktail is a mixture of the polypeptide or modulator of the invention with one or more anti-cancer drugs in addition to a pharmaceutically acceptable carrier for delivery. The use of anti-cancer cocktails as a cancer treatment is routine. Anti-cancer drugs that are well known in the art and can be used as a treatment in combination with the polypeptide or modulator of the invention include: Actinomycin D, Aminoglutethimide. Asparaginase, Bleomycin, Busulfan, Carboplatin, Carmustine, Chlorambucil, Cisplatin (cis-DDP), Cyclophosphamide, Cytarabine HCl (Cytosine arabinoside), Dacarbazine, Dactinomycin, Daunorubicin HCl, Doxorubicin HCl, Estramustine phosphate sodium, Etoposide (V16-213), Floxuridine, 5-Fluorouracil (5-Fu), Flutamide, Hydroxyurea (hydroxycarbamide), Ifosfamide, Interferon Alpha-2a, Interferon Alpha-2b, Leuprolide acetate (LHRH-releasing factor analog), Lomustine, Mechlorethamine HCl (nitrogen mustard), Melphalan, Mercaptopurine, Mesna, Methotrexate (MTX), Mitomycin, Mitoxantrone HCl, Octreotide, Plicamycin, Procarbazine HCl, Streptozocin, Tamoxifen citrate, Thioguanine, Thiotepa, Vinblastine sulfate, Vincristine sulfate, Amsacrine, Azacitidine, Hexamethylmelamine, Interleukin-2, Mitoguazone, Pentostatin, Semustine, Teniposide, and Vindesine sulfate.

[0233] In addition, therapeutic compositions of the invention may be used for prophylactic treatment of cancer. There are hereditary conditions and/or environmental situations (e.g. exposure to carcinogens) known in the art that predispose an individual to developing cancers. Under these circumstances, it may be beneficial to treat these individuals with therapeutically effective doses of the polypeptide of the invention to reduce the risk of developing cancers.

[0234] In vitro models can be used to determine the effective doses of the polypeptide of the invention as a potential cancer treatment. These in vitro models include proliferation assays of cultured tumor cells, growth of cultured tumor cells in soft agar (see Freshney, (1987) Culture of Animal Cells: A Manual of Basic Technique, Wily-Liss, New York, N.Y. Ch 18 and Ch 21), tumor systems in nude mice as described in Giovanella et al., J. Natl. Can. Inst., 52: 921-30 (1974), mobility and invasive potential of tumor cells in Boyden Chamber assays as described in Pilkington et al., Anticancer Res., 17: 4107-9 (1997), and angiogenesis assays such as induction of vascularization of the chick chorioallantoic membrane or induction of vascular endothelial cell migration as described in Ribatta et al., Intl. J. Dev. Biol., 40: 1189-97 (1999) and Li et al., Clin. Exp. Metastasis, 17:423-9 (1999), respectively. Suitable tumor cells lines are available, e.g. from American Type Tissue Culture Collection catalogs.

[0235] 4.10.12 Receptor/Ligand Activity

[0236] A polypeptide of the present invention may also demonstrate activity as receptor, receptor ligand or inhibitor or agonist of receptor/ligand interactions. A polynucleotide of the invention can encode a polypeptide exhibiting such characteristics. Examples of such receptors and ligands include, without limitation, cytokine receptors and their ligands, receptor kinases and their ligands, receptor phosphatases and their ligands, receptors involved in cell-cell interactions and their ligands (including without limitation, cellular adhesion molecules (such as selecting, integrins and their ligands) and receptor/ligand pairs involved in antigen presentation, antigen recognition and development of cellular and humoral immune responses. Receptors and ligands are also useful for screening of potential peptide or small molecule inhibitors of the relevant receptor/ligand interaction. A protein of the present invention (including, without limitation, fragments of receptors and ligands) may themselves be useful as inhibitors of receptor/ligand interactions.

[0237] The activity of a polypeptide of the invention may, among other means, be measured by the following methods:

[0238] Suitable assays for receptor-ligand activity include without limitation those described in: Current Protocols in Immunology, Ed by J. E. Coligan, A. M. Kruisbeek, D. H. Margulies, E. M. Shevach, W. Strober, Pub. Greene Publishing Associates and Wiley-Interscience (Chapter 7.28, Measurement of Cellular Adhesion under static conditions 7.28.1-7.28.22), Takai et al., Proc. Natl. Acad. Sci. USA 84:6864-6868, 1987; Bierer et al., J. Exp. Med. 168:1145-1156, 1988; Rosenstein et al., J. Exp. Med. 169:149-160 1989; Stoltenborg et al., J. Immunol. Methods 175:59-68, 1994; Stitt et al. Cell 80:661-670, 1995.

[0239] By way of example, the polypeptides of the invention may be used as a receptor for a ligand(s) thereby transmitting the biological activity of that ligand(s). Ligands may be identified through binding assays, affinity chromatography, dihybrid screening assays, BIAcore assays, gel overlay assays, or other methods known in the art.

[0240] Studies characterizing drugs or proteins as agonist or antagonist or partial agonists or a partial antagonist require the use of other proteins as competing ligands. The polypeptides of the present invention or ligand(s) thereof may be labeled by being coupled to radioisotopes, colorimetric molecules or a toxin molecules by conventional methods. (“Guide to Protein Purification” Murray P. Deutscher (ed) Methods in Enzymology Vol. 182 (1990) Academic Press, Inc. San Diego). Examples of radioisotopes include, but are not limited to, tritium and carbon-14. Examples of colorimetric molecules include, but are not limited to, fluorescent molecules such as fluorescamine, or rhodamine or other colorimetric molecules. Examples of toxins include, but are not limited, to ricin.

[0241] 4.10.13 Drug Screening

[0242] This invention is particularly useful for screening chemical compounds by using the novel polypeptides or binding fragments thereof in any of a variety of drug screening techniques. The polypeptides or fragments employed in such a test may either be free in solution, affixed to a solid support, borne on a cell surface or located intracellularly. One method of drug screening utilizes eukaryotic or prokaryotic host cells which are stably transformed with recombinant nucleic acids expressing the polypeptide or a fragment thereof. Drugs are screened against such transformed cells in competitive binding assays. Such cells, either in viable or fixed form, can be used for standard binding assays. One may measure, for example, the formation of complexes between polypeptides of the invention or fragments and the agent being tested or examine the diminution in complex formation between the novel polypeptides and an appropriate cell line, which are well known in the art.

[0243] Sources for test compounds that may be screened for ability to bind to or modulate (i.e., increase or decrease) the activity of polypeptides of the invention include (1) inorganic and organic chemical libraries, (2) natural product libraries, and (3) combinatorial libraries comprised of either random or mimetic peptides, oligonucleotides or organic molecules.

[0244] Chemical libraries may be readily synthesized or purchased from a number of commercial sources, and may include structural analogs of known compounds or compounds that are identified as “hits” or “leads” via natural product screening.

[0245] The sources of natural product libraries are microorganisms (including bacteria and fungi), animals, plants or other vegetation, or marine organisms, and libraries of mixtures for screening may be created by: (1) fermentation and extraction of broths from soil, plant or marine microorganisms or (2) extraction of the organisms themselves. Natural product libraries include polyketides, non-ribosomal peptides, and (non-naturally occurring) variants thereof. For a review, see Science 282:63-68 (1998).

[0246] Combinatorial libraries are composed of large numbers of peptides, oligonucleotides or organic compounds and can be readily prepared by traditional automated synthesis methods, PCR, cloning or proprietary synthetic methods. Of particular interest are peptide and oligonucleotide combinatorial libraries. Still other libraries of interest include peptide, protein, peptidomimetic, multiparallel synthetic collection, recombinatorial, and polypeptide libraries. For a review of combinatorial chemistry and libraries created therefrom, see Myers, Curr. Opin. Biotechnol. 8:701-707 (1997). For reviews and examples of peptidomimetic libraries, see Al-Obeidi et al., Mol. Biotechnol, 9(3):205-23 (1998): Hruby et al., Curr Opin Chem Biol, 1(1): 14-19 (1997); Dorner et al., Bioorg Med Chem. 4(5):709-15 (1996) (alkylated dipeptides).

[0247] Identification of modulators through use of the various libraries described herein permits modification of the candidate “hit” (or “lead”) to optimize the capacity of the “hit” to bind a polypeptide of the invention. The molecules identified in the binding assay are then tested for antagonist or agonist activity in in vivo tissue culture or animal models that are well known in the art. In brief, the molecules are titrated into a plurality of cell cultures or animals and then tested for either cell/animal death or prolonged survival of the animal/cells.

[0248] The binding molecules thus identified man be complexed with toxins, e.g. ricin or cholera, or with other compounds that are toxic to cells such as radioisotopes. The toxin-binding molecule complex is then targeted to a tumor or other cell by the specificity of the binding molecule for a polypeptide of the invention. Alternatively, the binding molecules may be complexed with imaging agents for targeting and imaging purposes.

[0249] 4.10.14 Assay for Receptor Activity

[0250] The invention also provides methods to detect specific binding of a polypeptide e.g. a ligand or a receptor. The art provides numerous assays particularly useful for identifying previously unknown binding partners for receptor polypeptides of the invention. For example, expression cloning using mammalian or bacterial cells, or dihybrid screening assays can be used to identify polynucleotides encoding binding partners. As another example, affinity chromatography with the appropriate immobilized polypeptide of the invention can be used to isolate polypeptides that recognize and bind polypeptides of the invention. There are a number of different libraries used for the identification of compounds, and in particular small molecules, that modulate (i.e. increase or decrease) biological activity of a polypeptide of the invention. Ligands for receptor polypeptides of the invention can also be identified by adding exogenous ligands, or cocktails of ligands to two cells populations that are genetically identical except for the expression of the receptor of the invention: one cell population expresses the receptor of the invention whereas the other does not. The response of the two cell populations to the addition of ligands(s) are then compared. Alternatively, an expression library can be co-expressed with the polypeptide of the invention in cells and assayed for an autocrine response to identify potential ligand(s). As still another example. BIAcore assays, gel overlay assays, or other methods known in the art can be used to identify binding partner polypeptides, including, (1) organic and inorganic chemical libraries. (2) natural product libraries, and (3) combinatorial libraries comprised of random peptides, oligonucleotides or organic molecules.

[0251] The role of downstream intracellular signaling molecules in the signaling cascade of the polypeptide of the invention can be determined. For example, a chimeric protein in which the cytoplasmic domain of the polypeptide of the invention is fused to the extracellular portion of a protein, whose ligand has been identified, is produced in a host cell. The cell is then incubated with the ligand specific for the extracellular portion of the chimeric protein, thereby activating the chimeric receptor. Known downstream proteins involved in intracellular signaling can then be assayed for expected modifications i.e. phosphorylation. Other methods known to those in the art can also be used to identify signaling molecules involved in receptor activity.

[0252] 4.10.15 Anti-Inflammatory Activity

[0253] Compositions of the present invention may also exhibit anti-inflammatory activity. The anti-inflammatory activity may be achieved by providing a stimulus to cells involved in the inflammatory response, by inhibiting or promoting cell-cell interactions (such as, for example, cell adhesion), by inhibiting or promoting chemotaxis of cells involved in the inflammatory process, inhibiting or promoting cell extravasation, or by stimulating or suppressing production of other factors which more directly inhibit or promote an inflammatory response. Compositions with such activities can be used to treat inflammatory conditions including chronic or acute conditions), including without limitation intimation associated with infection (such as septic shock, sepsis or systemic inflammatory response syndrome (SIRS)), ischemia-reperfusion injury, endotoxin lethality, arthritis, complement-mediated hyperacute rejection, nephritis, cytokine or chemokine-induced lung injury, inflammatory bowel disease, Crohn's disease or resulting from over production of cytokines such as TNF or IL-1. Compositions of the invention may also be useful to treat anaphylaxis and hypersensitivity to an antigenic substance or material. Compositions of this invention may be utilized to prevent or treat conditions such as, but not limited to, sepsis, acute pancreatitis, endotoxin shock, cytokine induced shock, rheumatoid arthritis, chronic inflammatory arthritis, pancreatic cell damage from diabetes mellitus type 1, graft versus host disease, inflammatory bowel disease, inflamation associated with pulmonary disease, other autoimmune disease or inflammatory disease, an antiproliferative agent such as for acute or chronic mylegenous leukemia or in the prevention of premature labor secondary to intrauterine infections.

[0254] 4.10.16 Leukemias

[0255] Leukemias and related disorders may be treated or prevented by administration of a therapeutic that promotes or inhibits function of the polynucleotides and/or polypeptides of the invention. Such leukemias and related disorders include but are not limited to acute leukemia, acute lymphocytic leukemia, acute myelocytic leukemia, myeloblastic, promyelocytic, myelomonocytic, monocytic, erythroleukemia, chronic leukemia, chronic myelocytic (granulocytic) leukemia and chronic lymphocytic leukemia (for a review of such disorders, see Fishman et al. 1985. Medicine. 2d Ed., J. B. Lippincott Co., Philadelphia).

[0256] 4.10.17 Nervous System Disorders

[0257] Nervous system disorders, involving cell types which can be tested for efficacy of intervention with compounds that modulate the activity of the polynucleotides and/or polypeptides of the invention, and which can be treated upon thus observing an indication of therapeutic utility, include but are not limited to nervous system injuries, and diseases or disorders which result in either a disconnection of axons, a diminution or degeneration of neurons, or demyelination. Nervous system lesions which may be treated in a patient (including human and non-human mammalian patients) according to the invention include but are not limited to the following lesions of either the central (including spinal cord, brain) or peripheral nervous systems:

[0258] (i) traumatic lesions, including lesions caused by physical injury or associated with surgery, for example, lesions which sever a portion of the nervous system, or compression injuries;

[0259] (ii) ischemic lesions, in which a lack of oxygen in a portion of the nervous system results in neuronal injury or death, including cerebral infarction or ischemia, or spinal cord infarction or ischemia;

[0260] (iii) infectious lesions, in which a portion of the nervous system is destroyed or injured as a result of infection, for example, by an abscess or associated with infection by human immunodeficiency virus, herpes zoster or herpes simplex virus or with Lyme disease, tuberculosis, syphilis;

[0261] (iv) degenerative lesions, in which a portion of the nervous system is destroyed or injured as a result of a degenerative process including but not limited to degeneration associated with Parkinson's disease, Alzheimer's disease, Huntington's chorea, or amyotrophic lateral sclerosis;

[0262] (v) lesions associated with nutritional diseases or disorders, in which a portion of the nervous system is destroyed or injured by a nutritional disorder or disorder of metabolism including but not limited to, vitamin B12 deficiency, folic acid deficiency, Wernicke disease, tobacco-alcohol amblyopia, Marchiafava-Bignami disease (primary degeneration of the corpus callosum), and alcoholic cerebellar degeneration;

[0263] (vi) neurological lesions associated with systemic diseases including but not limited to diabetes (diabetic neuropathy, Bell's palsy), systemic lupus erythematosus, carcinoma, or sarcoidosis;

[0264] (vii) lesions caused by toxic substances including alcohol, lead, or particular neurotoxins; and

[0265] (viii) demyelinated lesions in which a portion of the nervous system is destroyed or injured by a demyelinating disease including but not limited to multiple sclerosis, human immunodeficiency virus-associated myelopathy, transverse myelopathy or various etiologies, progressive multi focal leukoencephalopathy, and central pontine myelinolysis.

[0266] Therapeutics which are useful according to the invention for treatment of a nervous system disorder may be selected by testing for biological activity in promoting the survival or differentiation of neurons. For example, and not by way of limitation, therapeutics which elicit any of the following effects may be useful according to the invention:

[0267] (i) increased survival time of neurons in culture;

[0268] (ii) increased sprouting of neurons in culture or in vivo;

[0269] (iii) increased production of a neuron-associated molecule in culture or in vivo, e.g., choline acetyltransferase or acetylcholinesterase with respect to motor neurons; or

[0270] (iv) decreased symptoms of neuron dysfunction in vivo.

[0271] Such effects may be measured by any method known in the art. In preferred, non-limiting embodiments, increased survival of neurons may be measured by the method set forth in Arakawa et al. (1990, J. Neurosci. 10:3507-3515); increased sprouting of neurons may be detected by methods set forth in Pestronk et al. (1980, Exp. Neurol. 70:65-82) or Brown et al. (1981, Ann. Rev. Neurosci. 4:17-42); increased production of neuron-associated molecules may be measured by bioassay, enzymatic assay, antibody binding, Northern blot assay, etc., depending on the molecule to be measured; and motor neuron dysfunction may be measured by assessing the physical manifestation of motor neuron disorder, e.g., weakness, motor neuron conduction velocity, or functional disability.

[0272] In specific embodiments, motor neuron disorders that may be treated according to the invention include but are not limited to disorders such as infarction, infection, exposure to toxin, trauma, surgical damage, degenerative disease or malignancy that may affect motor neurons as well as other components of the nervous system, as well as disorders that selectively affect neurons such as amyotrophic lateral sclerosis, and including but not limited to progressive spinal muscular atrophy, progressive bulbar palsy, primary lateral sclerosis, infantile and juvenile muscular atrophy, progressive bulbar paralysis of childhood (Fazio-Londe syndrome), poliomyelitis and the post polio syndrome, and Hereditary Motorsensory Neuropathy (Charcot-Marie-Tooth Disease).

[0273] 4.10.18 Other Activities

[0274] A polypeptide of the invention may also exhibit one or more of the following additional activities or effects: inhibiting the growth, infection or function of, or killing, infectious agents, including, without limitation, bacteria, viruses, fungi and other parasites; effecting (suppressing or enhancing) bodily characteristics, including, without limitation, height, weight, hair color, eye color, skin, fat to lean ratio or other tissue pigmentation, or organ or body part size or shape (such as, for example, breast augmentation or diminution, change in bone form or shape); effecting biorhythms or circadian cycles or rhythms; effecting the fertility of male or female subjects: effecting the metabolism, catabolism, anabolism, processing, utilization, storage or elimination of dietary fat, lipid, protein, carbohydrate, vitamins, minerals, co-factors or other nutritional factors or component(s); effecting behavioral characteristics, including, without limitation, appetite, libido, stress, cognition (including cognitive disorders), depression (including depressive disorders) and violent behaviors; providing analgesic effects or other pain reducing effects; promoting differentiation and growth of embryonic stem cells in lineages other than hematopoietic lineages; hormonal or endocrine activity; in the case of enzymes, correcting deficiencies of the enzyme and treating deficiency-related diseases; treatment of hyperproliferative disorders (such as, for example, psoriasis); immunoglobulin-like activity (such as, for example, the ability to bind antigens or complement); and the ability to act as an antigen in a vaccine composition to raise an immune response against such protein or another material or entity which is cross-reactive with such protein.

[0275] 4.10.19 Identification of Polymorphisms

[0276] The demonstration of polymorphisms makes possible the identification of such polymorphisms in human subjects and the pharmacogenetic use of this information for diagnosis and treatment. Such polymorphisms may be associated with, e.g., differential predisposition or susceptibility to various disease states (such as disorders involving inflammation or immune response) or a differential response to drug administration, and this genetic information can be used to tailor preventive or therapeutic treatment appropriately. For example, the existence of a polymorphism associated with a predisposition to inflammation or autoimmune disease makes possible the diagnosis of this condition in humans by identifying the presence of the polymorphism.

[0277] Polymorphisms can be identified in a variety of ways known in the art which all generally involve obtaining a sample from a patient, analyzing DNA from the sample, optionally involving isolation or amplification of the DNA, and identifying the presence of the polymorphism in the DNA. For example, PCR may be used to amplify an appropriate fragment of genomic DNA which may then be sequenced. Alternatively, the DNA may be subjected to allele-specific oligonucleotide hybridization (in which appropriate oligonucleotides are hybridized to the DNA under conditions permitting detection of a single base mismatch) or to a single nucleotide extension assay (in which an oligonucleotide that hybridizes immediately adjacent to the position of the polymorphism is extended with one or more labeled nucleotides). In addition, traditional restriction fragment length polymorphism analysis (using restriction enzymes that provide differential digestion of the genomic DNA depending on the presence or absence of the polymorphism) may be performed. Arrays with nucleotide sequences of the present invention can be used to detect polymorphisms. The array can comprise modified nucleotide sequences of the present invention in order to detect the nucleotide sequences of the present invention. In the alternative, any one of the nucleotide sequences of the present invention can be placed on the array to detect changes from those sequences.

[0278] Alternatively a polymorphism resulting in a change in the amino acid sequence could also be detected by detecting a corresponding change in amino acid sequence of the protein, e.g., by an antibody specific to the variant sequence.

[0279] 4.10.20 Arthritis and Inflammation

[0280] The immunosuppressive effects of the compositions of the invention against rheumatoid arthritis is determined in an experimental animal model system. The experimental model system is adjuvant induced arthritis in rats, and the protocol is described by J. Holoshitz, et at., 1983, Science, 219:56, or by B. Waksman et al., 1963. Int. Arch. Allergy Appl. Immunol., 23:129. Induction of the disease can be caused by a single injection, generally intradermally, of a suspension of killed Mycobacterium tuberculosis in complete Freund's adjuvant (CFA). The route of injection can vary, but rats may be injected at the base of the tail with an adjuvant mixture. The polypeptide is administered in phosphate buffered solution (PBS) at a dose of about 1-5 mg/kg. The control consists of administering PBS only.

[0281] The procedure for testing the effects of the test compound would consist of intradermally injecting killed Mycobacterium tuberculosis in CFA followed by immediately administering the test compound and subsequent treatment every other day until day 24. At 14, 15, 18, 20, 22, and 24 days after injection of Mycobacterium CFA., an overall arthritis score may be obtained as described by J. Holoskitz above. An analysis of the data would reveal that the test compound would have a dramatic affect on the swelling of the joints as measured by a decrease of the arthritis score.

[0282] 4.11 Therapeutic Methods

[0283] The compositions (including polypeptide fragments, analogs, variants and antibodies or other binding partners or modulators including antisense polynucleotides) of the invention have numerous applications in a variety of therapeutic methods. Examples of therapeutic applications include, but are not limited to, those exemplified herein.

[0284] 4.11.1 EXAMPLE

[0285] One embodiment of the invention is the administration of an effective amount of the polypeptides or other composition of the invention to individuals affected by a disease or disorder that can be modulated by, regulating the peptides of the invention. While the mode of administration is not particularly important, parenteral administration is preferred. An exemplary mode of administration is to deliver an intravenous bolus. The dosage of the polypeptides or other composition of the invention will normally be determined by the prescribing physician. It is to be expected that the dosage will vary according to the age, weight, condition and response of the individual patient. Typically, the amount of polypeptide administered per dose will be in the range of about 0.01 μg/kg to 100 mg/kg of body weight, with the preferred dose being about 0.1 μg/kg to 10 mg/kg of patient body weight. For parenteral administration, polypeptides of the invention will be formulated in an injectable form combined with a pharmaceutically acceptable parenteral vehicle. Such vehicles are well known in the art and examples include water, saline, Ringer's solution, dextrose solution, and solutions consisting of small amounts of the human serum albumin. The vehicle may contain minor amounts of additives that maintain the isotonicity and stability of the polypeptide or other active ingredient. The preparation of such solutions is within the skill of the art.

[0286] 4.12 Pharmaceutical Formulations and Routes of Administration

[0287] A protein or other composition of the present invention (from whatever source derived, including without limitation from recombinant and non-recombinant sources and including antibodies and other binding partners of the polypeptides of the invention) may be administered to a patient in need, by itself, or in pharmaceutical compositions where it is mixed with suitable carriers or excipient(s) at doses to treat or ameliorate a variety of disorders. Such a composition may optionally contain (in addition to protein or other active ingredient and a carrier) diluents, fillers, salts, buffers, stabilizers, solubilizers, and other materials well known in the art. The term “pharmaceutically acceptable” means a non-toxic material that does not interfere with the effectiveness of the biological activity of the active ingredient(s). The characteristics of the carrier will depend on the route of administration. The pharmaceutical composition of the invention may also contain cytokines, lymphokines, or other hematopoietic factors such as M-CSF. GM-CSF, TNF, IL-1, IL-2, IL-3, IL-4, IL-5, IL-6, IL-7, IL-8, IL-9, IL-10, IL-11, IL-12, IL-13, IL-14, IL-15, IFN, TNF0, TNF1, TNF2, G-CSF, Meg-CSF, thrombopoietin, stem cell factor, and erythropoietin. In further compositions, proteins of the invention may be combined with other agents beneficial to the treatment of the disease or disorder in question. These agents include various growth factors such as epidermal growth factor (EGF), platelet-derived growth factor (PDGF), transforming growth factors (TGF-α and TGF-β), insulin-like growth factor (IGF), as well as cytokines described herein.

[0288] The pharmaceutical composition may further contain other agents which either enhance the activity of the protein or other active ingredient or complement its activity or use in treatment. Such additional factors and/or agents may be included in the pharmaceutical composition to produce a synergistic effect with protein or other active ingredient of the invention, or to minimize side effects. Conversely, protein or other active ingredient of the present invention may be included in formulations of the particular clotting factor, cytokine, lymphokine, other hematopoietic factor, thrombolytic or anti-thrombotic factor, or anti-inflammatory agent to minimize side effects of the clotting factor, cytokine, lymphokine, other hematopoietic factor, thrombolytic or anti-thrombotic factor, or anti-inflammatory agent (such as IL-1 Ra, IL-1 Hy1, IL-1 Hy2, anti-TNF, corticosteroids, immunosuppressive agents). A protein of the present invention may be active in multimers (e.g., heterodimers or homodimers) or complexes with itself or other proteins. As a result, pharmaceutical compositions of the invention may comprise a protein of the invention in such multimeric or complexed form.

[0289] As an alternative to being included in a pharmaceutical composition of the invention including a first protein, a second protein or a therapeutic agent may be concurrently administered with the first protein (e.g., at the same time, or at differing times provided that therapeutic concentrations of the combination of agents is achieved at the treatment site). Techniques for formulation and administration of the compounds of the instant application may be found in “Remington's Pharmaceutical Sciences.” Mack Publishing Co., Easton, Pa., latest edition. A therapeutically effective dose further refers to that amount of the compound sufficient to result in amelioration of symptoms, e.g., treatment, healing, prevention or amelioration of the relevant medical condition, or an increase in rate of treatment, healing, prevention or amelioration of such conditions. When applied to an individual active ingredient, administered alone, a therapeutically effective dose refers to that ingredient alone. When applied to a combination, a therapeutically effective dose refers to combined amounts of the active ingredients that result in the therapeutic effect, whether administered in combination, serially or simultaneously.

[0290] In practicing the method of treatment or use of the present invention, a therapeutically effective amount of protein or other active ingredient of the present invention is administered to a mammal having a condition to be treated. Protein or other active ingredient of the present invention may be administered in accordance with the method of the invention either alone or in combination with other therapies such as treatments employing cytokines, lymphokines or other hematopoletic factors. When co-administered with one or more cytokines, lymphokines or other hematopoietic factors, protein or other active ingredient of the present invention may be administered either simultaneously with the cytokine(s), lymphokine(s), other hematopoietic factor(s), thrombolytic or anti-thrombotic factors, or sequentially. If administered sequentially, the attending physician will decide on the appropriate sequence of administering protein or other active ingredient of the present invention in combination with cytokine(s), lymphokine(s), other hematopoietic factor(s), thrombolytic or anti-thrombotic factors.

[0291] 4.12.1 Routes of Administration

[0292] Suitable routes of administration may, for example, include oral, rectal, transmucosal, or intestinal administration; parenteral delivery, including intramuscular, subcutaneous, intramedullary injections, as well as intrathecal, direct intraventricular, intravenous, intraperitoneal, intranasal, or intraocular injections. Administration of protein or other active ingredient of the present invention used in the pharmaceutical composition or to practice the method of the present invention can be carried out in a variety of conventional ways, such as oral ingestion, inhalation, topical application or cutaneous, subcutaneous, intraperitoneal, parenteral or intravenous injection. Intravenous administration to the patient is preferred.

[0293] Alternately, one may administer the compound in a local rather than systemic manner, for example, via injection of the compound directly into a arthritic joints or in fibrotic tissue, often in a depot or sustained release formulation. In order to prevent the scarring process frequently occurring as complication of glaucoma surgery, the compounds may be administered topically, for example, as eye drops. Furthermore, one may administer the drug in a targeted drug delivery system, for example, in a liposome coated with a specific antibody, targeting, for example, arthritic or fibrotic tissue. The liposomes will be targeted to and taken up selectively by the afflicted tissue.

[0294] The polypeptides of the invention are administered by any route that delivers an effective dosage to the desired site of action. The determination of a suitable route of administration and an effective dosage for a particular indication is within the level of skill in the art. Preferably for wound treatment, one administers the therapeutic compound directly to the site. Suitable dosage ranges for the polypeptides of the invention can be extrapolated from these dosages or from similar studies in appropriate animal models. Dosages can then be adjusted as necessary by the clinician to provide maximal therapeutic benefit.

[0295] 4.12.2 Compositions/Formulations

[0296] Pharmaceutical compositions for use in accordance with the present invention thus may be formulated in a conventional manner using one or more physiologically acceptable carriers comprising excipients and auxiliaries which facilitate processing of the active compounds into preparations which can be used pharmaceutically. These pharmaceutical compositions may be manufactured in a manner that is itself known, e.g., by means of conventional mixing, dissolving, granulating, dragee-making, levigating, emulsifying, encapsulating, entrapping or lyophilizing processes. Proper formulation is dependent upon the route of administration chosen. When a therapeutically effective amount of protein or other active ingredient of the present invention is administered orally, protein or other active ingredient of the present invention will be in the form of a tablet, capsule, powder, solution or elixir. When administered in tablet form, the pharmaceutical composition of the invention may additionally contain a solid carrier such as a gelatin or an adjuvant. The tablet, capsule, and powder contain from about 5 to 95% protein or other active ingredient of the present invention, and preferably from about 25 to 90% protein or other active ingredient of the present invention. When administered in liquid form, a liquid carrier such as water, petroleum, oils of animal or plant origin such as peanut oil, mineral oil, soybean oil, or sesame oil, or synthetic oils may be added. The liquid form of the pharmaceutical composition may further contain physiological saline solution, dextrose or other saccharide solution, or glycols such as ethylene glycol, propylene glycol or polyethylene glycol. When administered in liquid form, the pharmaceutical composition contains from about 0.5 to 90% by weight of protein or other active ingredient of the present invention, and preferably from about 1 to 50% protein or other active ingredient of the present invention.

[0297] When a therapeutically effective amount of protein or other active ingredient of the present invention is administered by intravenous, cutaneous or subcutaneous injection, protein or other active ingredient of the present invention will be in the form of a pyrogen-free, parenterally acceptable aqueous solution. The preparation of such parenterally acceptable protein or other active ingredient solutions, having due regard to pH, isotonicity, stability, and the like, is within the skill in the art. A preferred pharmaceutical composition for intravenous, cutaneous, or subcutaneous injection should contain, in addition to protein or other active ingredient of the present invention, an isotonic vehicle such as Sodium Chloride Injection, Ringer's Injection, Dextrose Injection, Dextrose and Sodium Chloride Injection. Lactated Ringer's Injection, or other vehicle as known in the art. The pharmaceutical composition of the present invention may also contain stabilizers, preservatives, buffers, antioxidants, or other additives known to those of skill in the art. For injection, the agents of the invention may be formulated in aqueous solutions, preferably in physiologically compatible buffers such as Hanks's solution, Ringer's solution, or physiological saline buffer. For transmucosal administration, penetrants appropriate to the barrier to be permeated are used in the formulation. Such penetrants are generally known in the art.

[0298] For oral administration, the compounds can be formulated readily by combining the active compounds with pharmaceutically acceptable carriers ell known in the art. Such carriers enable the compounds of the invention to be formulated as tablets, pills, dragees, capsules, liquids, gels, syrups, slurries, suspensions and the like, for oral ingestion by a patient to be treated. Pharmaceutical preparations for oral use can be obtained from a solid excipient, optionally grinding a resulting mixture, and processing the mixture of granules, after adding suitable auxiliaries, if desired, to obtain tablets or dragee cores. Suitable excipients are, in particular, fillers such as sugars, including lactose, sucrose, mannitol, or sorbitol; cellulose preparations such as, for example, maize starch, wheat starch, rice starch, potato starch, gelatin, gum tragacanth, methyl cellulose, hydroxypropylmethyl-cellulose, sodium carboxymethylcellulose, and/or polyvinylpyrrolidone (PVP). If desired, disintegrating agents may be added, such as the cross-linked polyvinyl pyrrolidone, agar, or alginic acid or a salt thereof such as sodium alginate. Dragee cores are provided with suitable coatings. For this purpose, concentrated sugar solutions may be used, which may optionally contain gum arabic, talc, polyvinyl pyrrolidone, carbopol gel, polyethylene glycol, and/or titanium dioxide, lacquer solutions, and suitable organic solvents or solvent mixtures. Dyestuffs or pigments may be added to the tablets or dragee coatings for identification or to characterize different combinations of active compound doses.

[0299] Pharmaceutical preparations which can be used orally include push-fit capsules made of gelatin, as well as soft, sealed capsules made of gelatin and a plasticizer, such as glycerol or sorbitol. The push-fit capsules can contain the active ingredients in admixture with filler such as lactose, binders such as starches, and/or lubricants such as talc or magnesium stearate and, optionally, stabilizers. In soft capsules, the active compounds may be dissolved or suspended in suitable liquids, such as fatty oils, liquid paraffin, or liquid polyethylene glycols. In addition, stabilizers may be added. All formulations for oral administration should be in dosages suitable for such administration. For buccal administration, the compositions may take the form of tablets or lozenges formulated in conventional manner.

[0300] For administration by inhalation, the compounds for use according to the present invention are conveniently delivered in the form of an aerosol spray presentation from pressurized packs or a nebuliser, with the use of a suitable propellant, e.g., dichlorodifluoromethane, trichlorofluoromethane, dichlorotetrafluoroethane, carbon dioxide or other suitable gas. In the case of a pressurized aerosol the dosage unit may be determined by providing a real c to deliver a metered amount. Capsules and cartridges of, e.g., gelatin for use in an inhaler or insufflator may be formulated containing a powder mix of the compound and a suitable powder base such as lactose or starch. The compounds may be formulated for parenteral administration by injection, e.g., by bolus injection or continuous infusion. Formulations for injection may be presented in unit dosage form, e.g., in ampules or in multi-dose containers, with an added preservative. The compositions may take such forms as suspensions, solutions or emulsions in oily or aqueous vehicles, and may contain formulatory agents such as suspending, stabilizing and/or dispersing agents.

[0301] Pharmaceutical formulations for parenteral administration include aqueous solutions of the active compounds in water-soluble form. Additionally, suspensions of the active compounds may be prepared as appropriate oily injection suspensions. Suitable lipophilic solvents or vehicles include fatty oils such as sesame oil, or synthetic fatty acid esters, such as ethyl oleate or triglycerides, or liposomes. Aqueous injection suspensions may contain substances which increase the viscosity of the suspension, such as sodium carboxymethyl cellulose, sorbitol, or dextran. Optionally, the suspension may also contain suitable stabilizers or agents which increase the solubility of the compounds to allow for the preparation of highly concentrated solutions. Alternatively, the active ingredient may be in powder form for constitution with a suitable vehicle, e.g., sterile pyrogen-free water, before use.

[0302] The compounds may also be formulated in rectal compositions such as suppositories or retention enemas, e.g., containing conventional suppository bases such as cocoa butter or other glycerides. In addition to the formulations described previously, the compounds may also be formulated as a depot preparation. Such long acting formulations may be administered by implantation (for example subcutaneously or intramuscularly) or by intramuscular injection. Thus, for example, the compounds may be formulated with suitable polymeric or hydrophobic materials (for example as an emulsion in an acceptable oil) or ion exchange resins, or as sparingly soluble derivatives, for example, as a sparingly soluble salt.

[0303] A pharmaceutical carrier for the hydrophobic compounds of the invention is a co-solvent system comprising benzyl alcohol, a nonpolar surfactant, a water-miscible organic polymer, and an aqueous phase. The co-solvent system may be the VPD co-solvent system. VPD is a solution of 3% w/v benzyl alcohol, 8% w/v of the nonpolar surfactant polysorbate 80, and 65% w/v polyethylene glycol 300, made up to volume in absolute ethanol. The VPD co-solvent system (VPD:5W) consists of VPD diluted 1:1 with a 5% dextrose in water solution. This co-solvent system dissolves hydrophobic compounds well, and itself produces low toxicity upon systemic administration. Naturally, the proportions of a co-solvent system may be varied considerably without destroying its solubility and toxicity characteristics. Furthermore, the identity of the co-solvent components may be varied: for example, other low-toxicity nonpolar surfactants may be used instead of polysorbate 80: the fraction size of polyethylene glycol may be varied: other biocompatible polymers may replace polyethylene glycol, e.g. polyvinyl pyrrolidone; and other sugars or polysaccharides may substitute for dextrose. Alternatively, other delivery systems for hydrophobic pharmaceutical compounds may be employed. Liposomes and emulsions are well known examples of delivery vehicles or carriers for hydrophobic drugs. Certain organic solvents such as dimethylsulfoxide also may be employed, although usually at the cost of greater toxicity. Additionally, the compounds may be delivered using a sustained-release system, such as semipermeable matrices of solid hydrophobic polymers containing the therapeutic agent. Various types of sustained-release materials have been established and are well known by those skilled in the art. Sustained-release capsules may, depending on their chemical nature, release the compounds for a few weeks up to over 100 days. Depending on the chemical nature and the biological stability of the therapeutic reagent, additional strategies for protein or other active ingredient stabilization may be employed.

[0304] The pharmaceutical compositions also may comprise suitable solid or gel phase carriers or excipients. Examples of such carriers or excipients include but are not limited to calcium carbonate, calcium phosphate, various sugars, starches, cellulose derivatives, gelatin, and polymers such as polyethylene glycols. Many of the active ingredients of the invention may be provided as salts with pharmaceutically compatible counter ions. Such pharmaceutically acceptable base addition salts are those salts which retain the biological effectiveness and properties of the free acids and which are obtained by reaction with inorganic or organic bases such as sodium hydroxide, magnesium hydroxide, ammonia, trialkylamine, dialkylamine, monoalkylamine, dibasic amino acids, sodium acetate, potassium benzoate, triethanol amine and the like.

[0305] The pharmaceutical composition of the invention may be in the form of a complex of the protein(s) or other active ingredient(s) of present invention along with protein or peptide antigens. The protein and/or peptide antigen will deliver a stimulatory signal to both B and T lymphocytes. B lymphocytes will respond to antigen through their surface immunoglobulin receptor. T lymphocytes will respond to antigen through the T cell receptor (TCR) following presentation of the antigen by MHC proteins. MHC and structurally related proteins including those encoded by class I and class II MHC genes on host cells will serve to present the peptide antigen(s) to T lymphocytes. The antigen components could also be supplied as purified MHC-peptide complexes alone or with co-stimulatory molecules that can directly signal T cells. Alternatively antibodies able to bind surface immunoglobulin and other molecules on B cells as well as antibodies able to bind the TCR and other molecules on T cells can be combined with the pharmaceutical composition of the invention.

[0306] The pharmaceutical composition of the invention may be in the form of a liposome in which protein of the present invention is combined, in addition to other pharmaceutically acceptable carriers, with amphipathic agents such as lipids which exist in aggregated form as micelles, insoluble monolayers, liquid crystals, or lamellar layers in aqueous solution. Suitable lipids for liposomal formulation include, without limitation, monoglycerides, diglycerides, sulfatides, lysolecithins, phospholipids, saponin, bile acids, and the like. Preparation of such liposomal formulations is within the level of skill in the art, as disclosed, for example, in U.S. Pat. Nos. 4,235,871; 4,501,728; 4,837,028; and 4,737,323, all of which are incorporated herein by reference.

[0307] The amount of protein or other active ingredient of the present invention in the pharmaceutical composition of the present invention will depend upon the nature and severity of the condition being treated, and on the nature of prior treatments which the patient has undergone. Ultimately, the attending physician will decide the amount of protein or other active ingredient of the present invention with which to treat each individual patient. Initially, the attending physician will administer low doses of protein or other active ingredient of the present invention and observe the patient's response. Larger doses of protein or other active ingredient of the present invention may be administered until the optimal therapeutic effect is obtained for the patient, and at that point the dosage is not increased further. It is contemplated that the various pharmaceutical compositions used to practice the method of the present invention should contain about 0.01 μg to about 100 mg (preferably about 0.1 μg to about 10 mg, more preferably about 0.1 μg to about 1 mg) of protein or other active ingredient of the present invention per kg body weight. For compositions of the present invention which are useful for bone, cartilage, tendon or ligament regeneration, the therapeutic method includes administering the composition topically, systematically, or locally as an implant or device. When administered, the therapeutic composition for use in this invention is, of course, in a pyrogen-free, physiologically acceptable form. Further, the composition may desirably be encapsulated or injected in a viscous form for delivery to the site of bone, cartilage or tissue damage. Topical administration may be suitable for wound healing and tissue repair. Therapeutically useful agents other than a protein or other active ingredient of the invention which may also optionally be included in the composition as described above, may alternatively or additionally, be administered simultaneously or sequentially with the composition in the methods of the invention. Preferably for bone and/or cartilage formation, the composition would include a matrix capable of delivering the protein-containing or other active ingredient-containing composition to the site of bone and/or cartilage damage, providing a structure for the developing bone and cartilage and optimally capable of being resorbed into the body. Such matrices may be formed of materials presently in use for other implanted medical applications.

[0308] The choice of matrix material is based on biocompatibility, biodegradability, mechanical properties, cosmetic appearance and interface properties. The particular application of the compositions will define the appropriate formulation. Potential matrices for the compositions may be biodegradable and chemically defined calcium sulfate, tricalcium phosphate, hydroxyapatite, polylactic acid, polyglycolic acid and polyanhydrides. Other potential materials are biodegradable and biologically well-defined, such as bone or dermal collagen. Further matrices are comprised of pure proteins or extracellular matrix components. Other potential matrices are nonbiodegradable and chemically defined, such as sintered hydroxyapatite, bioglass, aluminates, or other ceramics. Matrices may be comprised of combinations of any of the above mentioned types of material, such as polylactic acid and hydroxyapatite or collagen and tricalcium phosphate. The bioceramics may be altered in composition, such as in calcium-aluminate-phosphate and processing to alter pore size, particle size, particle shape, and biodegradability. Presently preferred is a 50:50 (mole weight) copolymer of lactic acid and glycolic acid in the form of porous particles having diameters ranging from 150 to 800 microns. In some applications, it will be useful to utilize a sequestering agent, such as carboxymethyl cellulose or autologous blood clot, to prevent the protein compositions from disassociating from the matrix.

[0309] A preferred family of sequestering agents is cellulosic materials such as alkylcelluloses (including hydroxyalkylcelluloses), including methylcellulose, ethylcellulose, hydroxyethylcellulose, hydroxypropylcellulose, hydroxypropyl-methylcellulose, and carboxymethylcellulose, the most preferred being cationic salts of carboxymethylcellulose (CMC). Other preferred sequestering agents include hyaluronic acid, sodium alginate, poly(ethylene glycol), polyoxyethylene oxide, carboxyvinyl polymer and poly(vinyl alcohol). The amount of sequestering agent useful herein is 0.5-20 wt %, preferably 1-10 wt % based on total formulation weight, which represents the amount necessary to prevent desorption of the protein from the polymer matrix and to provide appropriate handling of the composition, yet not so much that the progenitor cells are prevented from infiltrating the matrix, thereby providing the protein the opportunity to assist the osteogenic activity of the progenitor cells. In further compositions, proteins or other active ingredients of the invention may be combined with other agents beneficial to the treatment of the bone and/or cartilage defect, wound, or tissue in question. These agents include various growth factors such as epidermal growth factor (EGF), platelet derived growth factor (PDGF), transforming growth factors (TGF-α and TGF-β), and insulin-like growth factor (IGF).

[0310] The therapeutic compositions are also presently valuable for veterinary applications. Particularly domestic animals and thoroughbred horses, in addition to humans, are desired patients for such treatment with proteins or other active ingredients of the present invention. The dosage regimen of a protein-containing, pharmaceutical composition to be used in tissue regeneration will be determined by the attending physician considering various factors which modify the action of the proteins, e.g., amount of tissue weight desired to be formed, the site of damage, the condition of the damaged tissue, the size of a wound, type of damaged tissue (e.g., bone), the patient's age, sex, and diet, the severity of any infection, time of administration and other clinical factors. The dosage may vary with the type of matrix used in the reconstitution and with inclusion of other proteins in the pharmaceutical composition. For example, the addition of other known growth factors, such as IGF 1 (insulin like growth factor 1), to the final composition, may also effect the dosage. Progress can be monitored by periodic assessment of tissue/bone growth and/or repair, for example, X-rays, histomorphometric determinations and tetracycline labeling.

[0311] Polynucleotides of the present invention can also be used for gene therapy. Such polynucleotides can be introduced either in vivo or ex vivo into cells for expression in a mammalian subject. Polynucleotides of the invention may also be administered by other known methods for introduction of nucleic acid into a cell or organism (including, without limitation, in the form of viral vectors or naked DNA). Cells may also be cultured ex vivo in the presence of proteins of the present invention in order to proliferate or to produce a desired effect on or activity in such cells. Treated cells can then be introduced in vivo for therapeutic purposes.

[0312] 4.12.3 Effective Dosage

[0313] Pharmaceutical compositions suitable for use in the present invention include compositions wherein the active ingredients are contained in an effective amount to achieve its intended purpose. More specifically, a therapeutically effective amount means an amount effective to prevent development of or to alleviate the existing symptoms of the subject being treated. Determination of the effective amount is well within the capability of those skilled in the art, especially in light of the detailed disclosure provided herein. For any compound used in the method of the invention, the therapeutically effective dose can be estimated initially from appropriate in vitro assays. For example, a dose can be formulated in animal models to achieve a circulating concentration range that can be used to more accurately determine useful doses in humans. For example, a dose can be formulated in animal models to achieve a circulating concentration range that includes the IC₅₀ as determined in cell culture (i.e., the concentration of the test compound which achieves a half-maximal inhibition of the protein's biological activity). Such information can be used to more accurately determine useful doses in humans.

[0314] A therapeutically effective dose refers to that amount of the compound that results in amelioration of symptoms or a prolongation of survival in a patient. Toxicity and therapeutic efficacy of such compounds can be determined by standard pharmaceutical procedures in cell cultures or experimental animals, e.g., for determining the LD₅₀ (the dose lethal to 50% of the population) and the ED₅₀ (the dose therapeutically effective in 50% of the population). The dose ratio between toxic and therapeutic effects is the therapeutic index and it can be expressed as the ratio between LD₅₀ and ED₅₀. Compounds which exhibit high therapeutic indices are preferred. The data obtained from these cell culture assays and animal studies can be used in formulating a range of dosage for use in human. The dosage of such compounds lies preferably within a range of circulating concentrations that include the ED₅₀ with little or no toxicity. The dosage may vary within this range depending upon the dosage form employed and the route of administration utilized. The exact formulation, route of administration and dosage can be chosen by the individual physician in view of the patient's condition. See, e.g., Fingl et al., 1975, in “The Pharmacological Basis of Therapeutics”, Ch. 1 p.1. Dosage amount and interval may be adjusted individually to provide plasma levels of the active moiety which are sufficient to maintain the desired effects, or minimal effective concentration (MEC). The MEC will vary for each compound but can be estimated from in vitro data. Dosages necessary to achieve the MEC will depend on individual characteristics and route of administration. However, HPLC assays or bioassays can be used to determine plasma concentrations.

[0315] Dosage intervals can also be determined using MEC value. Compounds should be administered using a regimen which maintains plasma levels above the MEC for 10-90% of the time, preferably between 30-90% and most preferably between 50-90%. In cases of local administration or selective uptake, the effective local concentration of the drug may not be related to plasma concentration.

[0316] An exemplary dosage regimen for polypeptides or other compositions of the invention will be in the range of about 0.01 μg/kg to 100 mg/kg of body weight daily, with the preferred dose being about 0.1 μg/kg to 25 mg/kg of patient body weight daily, varying in adults and children. Dosing may be once daily, or equivalent doses may be delivered at longer or shorter intervals.

[0317] The amount of composition administered will, of course, be dependent on the subject being treated, on the subject's age and weight, the severity of the affliction, the manner of administration and the judgment of the prescribing physician.

[0318] 4.12.4 Packaging

[0319] The compositions may, if desired, be presented in a pack or dispenser device which may contain one or more unit dosage forms containing the active ingredient. The pack may, for example, comprise metal or plastic foil, such as a blister pack. The pack or dispenser device may be accompanied by instructions for administration. Compositions comprising a compound of the invention formulated in a compatible pharmaceutical carrier may also be prepared, placed in an appropriate container, and labeled for treatment of an indicated condition.

[0320] 4.13 Antibodies

[0321] Also included in the invention are antibodies to proteins, or fragments of proteins of the invention. The term “antibody” as used herein refers to immunoglobulin molecules and immunologically active portions of immunoglobulin (Ig) molecules, i.e., molecules that contain an antigen binding site that specifically binds (immunoreacts with) an antigen. Such antibodies include, but are not limited to, polyclonal, monoclonal, chimeric, single chain, F_{ab}, F_{ab} and F_{(ab′)}2 fragments, and an F_{ab} expression library. In general, an antibody molecule obtained from humans relates to any of the classes IgG, IgM, IgA, IgE and IgD, which differ from one another by the nature of the heavy chain present in the molecule. Certain classes have subclasses as well, such as IgG₁, IgG₂, and others. Furthermore, in humans, the light chain may be a kappa chain or a lambda chain. Reference herein to antibodies includes a reference to all such classes, subclasses and types of human antibody species.

[0322] An isolated related protein of the invention may be intended to serve as an antigen, or a portion or fragment thereof, and additionally can be used as an immunogen to generate antibodies that immunospecifically bind the antigen, using standard techniques for polyclonal and monoclonal antibody preparation. The full-length protein can be used or, alternatively, the invention provides antigenic peptide fragments of the antigen for use as immunogens. An antigenic peptide fragment comprises at least 6 amino acid residues of the amino acid sequence of the full length protein, such as the amino acid sequences shown in SEQ ID NO: 246-490, and encompasses an epitope thereof such that an antibody raised against the peptide forms a specific immune complex with the full length protein or with any fragment that contains the epitope. Preferably, the antigenic peptide comprises at least 10 amino acid residues, or at least 15 amino acid residues, or at least 20 amino acid residues, or at least 30 amino acid residues. Preferred epitopes encompassed by the antigenic peptide are regions of the protein that are located on its surface; commonly these are hydrophilic regions.

[0323] In certain embodiments of the invention, at least one epitope encompassed by the antigenic peptide is a region of related protein that is located on the surface of the protein, e.g., a hydrophilic region. A hydrophobicity analysis of the human related protein sequence will indicate which regions of a related protein are particularly hydrophilic and, therefore, are likely to encode surface residues useful for targeting antibody production. As a means for targeting antibody production, hydropathy plots showing regions of hydrophilicity and hydrophobicity may be generated by any method well known in the art, including, for example, the Kyte Doolittle or the Hopp Woods methods, either with or without Fourier transformation. See, e.g., Hopp and Woods, 1981. Proc. Nat. Acad Sci. USA 78: 3824-3828; Kyte and Doolittle 1982, J. Mol. Biol. 157: 105-142, each of which is incorporated herein by reference in its entirety. Antibodies that are specific for one or more domains within an antigenic protein, or derivatives, fragments, analogs or homologs thereof, are also provided herein.

[0324] A protein of the invention, or a derivative, fragment, analog, homolog or ortholog thereof, may be utilized as an immunogen in the generation of antibodies that immunospecifically bind these protein components.

[0325] Various procedures known within the art may be used for the production of polyclonal or monoclonal antibodies directed against a protein of the invention, or against derivatives, fragments, analogs homologs or orthologs thereof (see, for example, Antibodies: A Laboratory Manual, Harlow E. and Lane D, 1988, Cold Spring Harbor Laboratory Press, Cold Spring Harbor, N.Y., incorporated herein by reference). Some of these antibodies are discussed below.

[0326] 4.13.1 Polyclonal Antibodies

[0327] For the production of polyclonal antibodies, various suitable host animals (e.g., rabbit, goat, mouse or other mammal) may be immunized by one or more injections with the native protein, a synthetic variant thereof, or a derivative of the foregoing. An appropriate immunogenic preparation can contain, for example, the naturally occurring immunogenic protein, a chemically synthesized polypeptide representing the immunogenic protein, or a recombinantly expressed immunogenic protein. Furthermore, the protein may be conjugated to a second protein known to be immunogenic in the mammal being immunized. Examples of such immunogenic proteins include but are not limited to keyhole limpet hemocyanin, serum albumin, bovine thyroglobulin, and soybean trypsin inhibitor. The preparation can further include an adjuvant. Various adjuvants used to increase the immunological response include, but are not limited to, Freund's (complete and incomplete), mineral gels (e.g., aluminum hydroxide), surface active substances (e.g. lysolecithin, pluronic polyols, polyanions, peptides, oil emulsions, dinitrophenol, etc.), adjuvants usable in humans such as Bacille Calmette-Guerin and Corynebacterium parvum, or similar immunostimulatory agents. Additional examples of adjuvants which can be employed include MPL-TDM adjuvant (monophosphoryl Lipid A, synthetic trehalose dicorynomycolate).

[0328] The polyclonal antibody molecules directed against the immunogenic protein can be isolated from the mammal (e.g., from the blood) and further purified by well known techniques, such as affinity chromatography using protein A or protein G, which provide primarily the IgG fraction of immune serum. Subsequently, or alternatively, the specific antigen which is the target of the immunoglobulin sought, or an epitope thereof, may be immobilized on a column to purify the immune specific antibody by immunoaffinity chromatography. Purification of immunoglobulins is discussed, for example, by D. Wilkinson (The Scientist, published by The Scientist, Inc., Philadelphia Pa., Vol. 14, No. 8 (Apr. 17, 2000), pp. 25-28).

[0329] 4.13.2 Monoclonal Antibodies

[0330] The term “monoclonal antibody” (MAb) or “monoclonal antibody composition”, as used herein, refers to a population of antibody molecules that contain only one molecular species of antibody molecule consisting of a unique light chain gene product and a unique heavy chain gene product. In particular, the complementarity determining regions (CDRs) of the monoclonal antibody are identical in all the molecules of the population. MAbs thus contain an antigen binding site capable of immunoreacting with a particular epitope of the antigen characterized by a unique binding affinity for it.

[0331] Monoclonal antibodies can be prepared using hybridoma methods, such as those described by Kohler and Milstein, Nature, 256:495 (1975). In a hybridoma method, a mouse, hamster, or other appropriate host animal, is typically immunized with an immunizing agent to elicit lymphocytes that produce or are capable of producing antibodies that will specifically bind to the immunizing agent. Alternatively, the lymphocytes can be immunized in vitro. The immunizing agent will typically include the protein antigen, a fragment thereof or a fusion protein thereof. Generally, either peripheral blood lymphocytes are used if cells of human origin are desired, or spleen cells or lymph node cells are used if non-human mammalian sources are desired. The lymphocytes are then fused with an immortalized cell line using a suitable fusing agent, such as polyethylene glycol, to form a hybridoma cell (Goding, Monoclonal Antibodies: Principles and Practice, Academic Press, (1986) pp. 59-103). Immortalized cell lines are usually transformed mammalian cells, particularly myeloma cells of rodent, bovine and human origin. Usually, rat or mouse myeloma cell lines are employed. The hybridoma cells can be cultured in a suitable culture medium that preferably contains one or more substances that inhibit the growth or survival of the unfused, immortalized cells. For example, if the parental cells lack the enzyme hypoxanthine guanine phosphoribosyl transferase (HGPRT or HPRT), the culture medium for the hybridomas typically will include hypoxanthine, aminopterin, and thymidine (“HAT medium”), which substances prevent the growth of HGPRT-deficient cells.

[0332] Preferred immortalized cell lines are those that fuse efficiently, support stable high level expression of antibody by the selected antibody-producing cells, and are sensitive to a medium such as HAT medium. More preferred immortalized cell lines are murine myeloma lines, which can be obtained, for instance, from the Salk Institute Cell Distribution Center, San Diego, Calif. and the American Type Culture Collection, Manassas, Va. Human myeloma and mouse-human heteromyeloma cell lines also have been described for the production of human monoclonal antibodies (Kozbor, J. Immunol., 133:3001 (1984); Brodeur et al., Monoclonal Antibody Production Techniques and Applications, Marcel Dekker, Inc., New York, (1987) pp. 51-63).

[0333] The culture medium in which the hybridoma cells are cultured can then be assayed for the presence of monoclonal antibodies directed against the antigen. Preferably, the binding specificity of monoclonal antibodies produced by the hybridoma cells is determined by immunoprecipitation or by an in vitro binding assay, such as radioimmunoassay (RIA) or enzyme-linked immunoabsorbent assay (ELISA). Such techniques and assays are known in the art. The binding affinity of the monoclonal antibody can, for example, be determined by the Scatchard analysis of Munson and Pollard, Anal. Biochem., 107:220 (1980). Preferably, antibodies having a high degree of specificity and a high binding affinity for the target antigen are isolated.

[0334] After the desired hybridoma cells are identified, the clones can be subcloned by limiting dilution procedures and grown by standard methods. Suitable culture media for this purpose include, for example. Dulbecco's Modified Eagle's Medium and RPMI-1640 medium. Alternatively, the hybridoma cells can be grown in vivo as ascites in a mammal.

[0335] The monoclonal antibodies secreted by the subclones can be isolated or purified from the culture medium or ascites fluid by conventional immunoglobulin purification procedures such as, for example, protein A-Sepharose, hydroxylapatite chromatography, gel electrophoresis, dialysis, or affinity chromatography.

[0336] The monoclonal antibodies can also be made by recombinant DNA methods, such as those described in U.S. Pat. No. 4,816,567. DNA encoding the monoclonal antibodies of the invention can be readily isolated and sequenced using conventional procedures (e.g., by using oligonucleotide probes that are capable of binding specifically to genes encoding the heavy and light chains of murine antibodies). The hybridoma cells of the invention serve as a preferred source of such DNA. Once isolated, the DNA can be placed into expression vectors, which are then transfected into host cells such as simian COS cells, Chinese hamster ovary (CHO) cells, or myeloma cells that do not otherwise produce immunoglobulin protein, to obtain the synthesis of monoclonal antibodies in the recombinant host cells. The DNA also can be modified, for example, by substituting the coding sequence for human heavy and light chain constant domains in place of the homologous murine sequences (U.S. Pat. No. 4,816,567: Morrison, Nature 368, 812-13 (1994)) or by covalently joining to the immunoglobulin coding sequence all or part of the coding sequence for a non-immunoglobulin polypeptide. Such a non-immunoglobulin polypeptide can be substituted for the constant domains of an antibody of the invention, or can be substituted for the variable domains of one antigen-combining site of an antibody of the invention to create a chimeric bivalent antibody.

[0337] 4.13.3 Humanized Antibodies

[0338] The antibodies directed against the protein antigens of the invention can further comprise humanized antibodies or human antibodies. These antibodies are suitable for administration to humans without engendering an immune response by the human against the administered immunoglobulin. Humanized forms of antibodies are chimeric immunoglobulins, immunoglobulin chains or fragments thereof (such as Fv, Fab, Fab′, F(ab′)₂ or other antigen-binding subsequences of antibodies) that are principally comprised of the sequence of a human immunoglobulin, and contain minimal sequence derived from a non-human immunoglobulin. Humanization can be performed following the method of Winter and co-workers (Jones et al., Nature, 321:522-525 (1986); Riechmann et al., Nature, 332:323-327 (1988); Verhoeyen et al., Science, 239:1534-1536 (1988)), by substituting rodent CDRs or CDR sequences for the corresponding sequences of a human antibody. (See also U.S. Pat. No. 5,225,539.) In some instances, Fv framework residues of the human immunoglobulin are replaced by corresponding non-human residues. Humanized antibodies can also comprise residues which are found neither in the recipient antibody nor in the imported CDR or framework sequences. In general, the humanized antibody will comprise substantially all of at least one, and typically two, variable domains, in which all or substantially all of the CDR regions correspond to those of a non-human immunoglobulin and all or substantially all of the framework regions are those of a human immunoglobulin consensus sequence. The humanized antibody optimally also will comprise at least a portion of an immunoglobulin constant region (Fc), typically that of a human immunoglobulin (Jones et al., 1986; Riechmann et al., 1988; and Presta., Curr. Op. Struct. Biol., 2:593-596 (1992)).

[0339] 4.13.4 Human Antibodies

[0340] Fully human antibodies relate to antibody molecules in which essentially the entire sequences of both the light chain and the heavy chain, including the CDRs, arise from human genes. Such antibodies are termed “human antibodies”, or “fully human antibodies” herein. Human monoclonal antibodies can be prepared by the trioma technique: the human B-cell hybridoma technique (see Kozbor, et al. 1983 Immunol Today 4: 72) and the EBV hybridoma technique to produce human monoclonal antibodies (see Cole, et al. 1985 In: MONOCLONAL ANTIBODIES AND CANCER THERAPY. Alan R. Liss, Inc. pp. 77-96). Human monoclonal antibodies may be utilized in the practice of the present invention and may be produced by using human hybridomas (see Cote, et al., 1983. Proc Natl Acad Sci USA 80: 2026-2030) or by transforming human B-cells with Epstein Barr Virus in vitro (see Cole, et al., 1985 In: MONOCLONAL ANTIBODIES AND CANCER THERAPY, Alan R. Liss, Inc., pp. 77-96).

[0341] In addition, human antibodies can also be produced using additional techniques, including phage display libraries (Hoogenboom and Winter, J. Mol. Biol., 227:381 (1991); Marks et al., J. Mol. Biol., 222:581 (1991)). Similarly, human antibodies can be made by introducing human immunoglobulin loci into transgenic animals, e.g., mice in which the endogenous immunoglobulin genes have been partially or completely inactivated. Upon challenge, human antibody production is observed, which closely resembles that seen in humans in all respects, including gene rearrangement, assembly, and antibody repertoire. This approach is described, for example, in U.S. Pat. Nos. 5,545,807; 5,545,806; 5,569,825; 5,625,126; 5,633,425; 5,661,016, and in Marks et al. (Bio/Technology 10 779-783 (1992)); Lonberg et al. (Nature 368 856-859 (1994)); Morrison (Nature 368, 812-13 (1994)); Fishwild et al,(Nature Biotechnology 14, 845-51 (1996)); Neuberger (Nature Biotechnology 14, 826 (1996)); and Lonberg and Huszar (Intern. Rev. Immunol. 13 65-93 (1995)).

[0342] Human antibodies may additionally be produced using transgenic nonhuman animals which are modified so as to produce fully human antibodies rather than the animal's endogenous antibodies in response to challenge by an antigen. (See PCT publication WO94/02602). The endogenous genes encoding the heavy and light immunoglobulin chains in the nonhuman host have been incapacitated, and active loci encoding human heavy and light chain immunoglobulins are inserted into the host's genome. The human genes are incorporated, for example, using yeast artificial chromosomes containing the requisite human DNA segments. An animal which provides all the desired modifications is then obtained as progeny by crossbreeding intermediate transgenic animals containing fewer than the full complement of the modifications. The preferred embodiment of such a nonhuman animal is a mouse, and is termed the Xenomouse™ as disclosed in PCT publications WO 96/33735 and WO 96/34096. This animal produces B cells which secrete fully human immunoglobulins. The antibodies can be obtained directly from the animal after immunization with an immunogen of interest, as, for example, a preparation of a polyclonal antibody, or alternatively from immortalized B cells derived from the animal, such as hybridomas producing monoclonal antibodies. Additionally, the genes encoding the immunoglobulins with human variable regions can be recovered and expressed to obtain the antibodies directly, or can be further modified to obtain analogs of antibodies such as, for example, single chain Fv molecules.

[0343] An example of a method of producing a nonhuman host, exemplified as a mouse, lacking expression of an endogenous immunoglobulin heavy chain is disclosed in U.S. Pat. No. 5,939,598. It can be obtained by a method including deleting the J segment genes from at least one endogenous heavy chain locus in an embryonic stem cell to prevent rearrangement of the locus and to prevent formation of a transcript of a rearranged immunoglobulin heavy chain locus, the deletion being effected by a targeting vector containing a gene encoding a selectable marker; and producing from the embryonic stem cell a transgenic mouse whose somatic and germ cells contain the gene encoding the selectable marker.

[0344] A method for producing an antibody of interest, such as a human antibody, is disclosed in U.S. Pat. No. 5,916,771. It includes introducing an expression vector that contains a nucleotide sequence encoding a heavy chain into one mammalian host cell in culture, introducing an expression vector containing a nucleotide sequence encoding a light chain into another mammalian host cell, and fusing the two cells to form a hybrid cell. The hybrid cell expresses an antibody containing the heavy chain and the light chain.

[0345] In a further improvement on this procedure, a method for identifying a clinically relevant epitope on an immunogen, and a correlative method for selecting an antibody that binds immunospecifically to the relevant epitope with high affinity, are disclosed in PCT publication WO 99/53049.

[0346] 4.13.5 F_{ab} Fragments and Single Chain Antibodies

[0347] According to the invention, techniques can be adapted for the production of single-chain antibodies specific to an antigenic protein of the invention (see e.g., U.S. Pat. No. 4,946,778). In addition, methods can be adapted for the construction of Fab expression libraries (see e.g., Huse, et al., 1989 Science 246: 1275-1281) to allow rapid and effective identification of monoclonal F_{ab} fragments with the desired specificity for a protein or derivatives, fragments, analogs or homologs thereof. Antibody fragments that contain the idiotypes to a protein antigen may be produced by techniques known in the art including, but not limited to: (i) an F_{(ab′)2} fragment produced by pepsin digestion of an antibody molecule; (ii) an F_{ab} fragment generated by reducing the disulfide bridges of an F_{(ab′)2} fragment; (iii) an F_{ab} fragment generated by the treatment of the antibody molecule with papain and a reducing agent and (iv) F, fragments.

[0348] 4.13.6 Bispecific Antibodies

[0349] Bispecific antibodies are monoclonal, preferably human or humanized, antibodies that have binding specificities for at least two different antigens. In the present case, one of the binding specificities is for an antigenic protein of the invention. The second binding target is any other antigen, and advantageously is a cell-surface protein or receptor or receptor subunit.

[0350] Methods for making bispecific antibodies are known in the art. Traditionally, the recombinant production of bispecific antibodies is based on the co-expression of two immunoglobulin heavy-chain/light-chain pairs, where the two heavy chains have different specificities (Milstein and Cuello, Nature, 305:537-539 (1983)). Because of the random assortment of immunoglobulin heavy and light chains, these hybridomas (quadromas) produce a potential mixture of ten different antibody molecules, of which only one has the correct bispecific structure. The purification of the correct molecule is usually accomplished by affinity chromatography steps. Similar procedures are disclosed in WO 93/08829, published May 13, 1993, and in Traunecker et al., 1991 EMBO J., 10:3655-3659.

[0351] Antibody variable domains with the desired binding specificities (antibody-antigen combining sites) can be fused to immunoglobulin constant domain sequences. The fusion preferably is with an immunoglobulin heavy-chain constant domain, comprising at least part of the hinge, CH2, and CH3 regions. It is preferred to have the first heavy-chain constant region (CH1) containing the site necessary for light-chain binding present in at least one of the fusions. DNAs encoding the immunoglobulin heavy-chain fusions and, if desired, the immunoglobulin light chain, are inserted into separate expression vectors, and are co-transfected into a suitable host organism. For further details of generating bispecific antibodies see, for example, Suresh et al., Methods in Enzymology, 121:210 (1986).

[0352] According to another approach described in WO 96/27011, the interface between a pair of antibody molecules can be engineered to maximize the percentage of heterodimers which are recovered from recombinant cell culture. The preferred interface comprises at least a part of the CH3 region of an antibody constant domain. In this method, one or more small amino acid side chains from the interface of the first antibody molecule are replaced with larger side chains (e.g. tyrosine or tryptophan). Compensatory “cavities” of identical or similar size to the large side chain(s) are created on the interface of the second antibody molecule by replacing large amino acid side chains with smaller ones (e.g. alanine or threonine). This provides a mechanism for increasing the yield of the heterodimer over other unwanted end-products such as homodimers.

[0353] Bispecific antibodies can be prepared as full length antibodies or antibody fragments (e.g. F(ab′)₂ bispecific antibodies). Techniques for generating bispecific antibodies from antibody fragments have been described in the literature. For example, bispecific antibodies can be prepared using chemical linkage. Brennan et al. Science 229:81 (1985) describe a procedure wherein intact antibodies are proteolytically cleaved to generate F(ab′)₂ fragments. These fragments are reduced in the presence of the dithiol complexing agent sodium arsenite to stabilize vicinal dithiols and prevent intermolecular disulfide formation. The Fab′ fragments generated are then converted to thionitrobenzoate (TNB) derivatives. One of the Fab′-TNB derivatives is then reconverted to the Fab′-thiol by reduction with mercaptoethylamine and is mixed with an equimolar amount of the other Fab′-TNB derivative to form the bispecific antibody. The bispecific antibodies produced can be used as agents for the selective immobilization of enzymes.

[0354] Additionally, Fab′ fragments can be directly recovered from E. coli and chemically coupled to form bispecific antibodies. Shalaby et al., J. Exp. Med. 175:217-225 (1992) describe the production of a fully humanized bispecific antibody F(ab′)₂ molecule. Each Fab′ fragment was separately secreted from E. coli and subjected to directed chemical coupling in vitro to form the bispecific antibody. The bispecific antibody thus formed was able to bind to cells overexpressing the ErbB2 receptor and normal human T cells, as well as trigger the lytic activity of human cytotoxic lymphocytes against human breast tumor targets.

[0355] Various techniques for making and isolating bispecific antibody fragments directly from recombinant cell culture have also been described. For example, bispecific antibodies have been produced using leucine zippers. Kostelny et al., J. Immunol. 148(5):1547-1553 (1992). The leucine zipper peptides from the Fos and Jun proteins were linked to the Fab′ portions of two different antibodies by gene fusion. The antibody homodimers were reduced at the hinge region to form monomers and then re-oxidized to form the antibody heterodimers. This method can also be utilized for the production of antibody homodimers. The “diabody” technology described by Hollinger et al., Proc. Natl. Acad. Sci. USA 90:6444-6448 (1993) has provided an alternative mechanism for making bispecific antibody fragments. The fragments comprise a heavy-chain variable domain (V_{H}) connected to a light-chain variable domain (V_{L}) by a linker which is too short to allow pairing between the two domains on the same chain. Accordingly, the V_{H} and V_{L} domains of one fragment are forced to pair with the complementary V_{L} and V_{H} domains of another fragment, thereby forming two antigen-binding sites. Another strategy for making bispecific antibody fragments by the use of single-chain Fv (sFv) dimers has also been reported. See, Gruber et al., J. Immunol. 152:5368 (1994).

[0356] Antibodies with more than two valencies are contemplated. For example, trispecific antibodies can be prepared. Tutt et al., J. Immunol. 147:60 (1991).

[0357] Exemplary bispecific antibodies can bind to two different epitopes, at least one of which originates in the protein antigen of the invention. Alternatively, an anti-antigenic arm of an immunoglobulin molecule can be combined with an arm which binds to a triggering molecule on a leukocyte such as a T-cell receptor molecule (e.g. CD2, CD3, CD28, or B7), or Fc receptors for IgG (FcγR), such as FcγRI (CD64), FcγRII (CD)32) and FcγRIII (CD16) so as to focus cellular defense mechanisms to the cell expressing the particular antigen. Bispecific antibodies can also be used to direct cytotoxic agents to cells which express a particular antigen. These antibodies possess an antigen-binding arm and an arm which binds a cytotoxic agent or a radionuclide chelator, such as EOTUBE, DPTA, DOTA, or TETA. Another bispecific antibody of interest binds the protein antigen described herein and further binds tissue factor (TF).

[0358] 4.13.7 Heteroconjugate Antibodies

[0359] Heteroconjugate antibodies are also within the scope of the present invention. Heteroconjugate antibodies are composed of two covalently joined antibodies. Such antibodies have, for example, been proposed to target immune system cells to unwanted cells (U.S. Pat. No. 4,676,980), and for treatment of HIV infection (WO 91/00360; WO 92/200373; EP 03089). It is contemplated that the antibodies can be prepared in vitro using known methods in synthetic protein chemistry, including those involving crosslinking agents. For example, immunotoxins can be constructed using a disulfide exchange reaction or by forming a thioether bond. Examples of suitable reagents for this purpose include iminothiolate and methyl-4-mercaptobutyrimidate and those disclosed, for example, in U.S. Pat. No. 4,676,980.

[0360] 4.13.8 Effector Function Engineering

[0361] It can be desirable to modify the antibody of the invention with respect to effector function, so as to enhance, e.g., the effectiveness of the antibody in treating cancer. For example, cysteine residue(s) can be introduced into the Fc region, thereby allowing interchain disulfide bond formation in this region. The homodimeric antibody thus generated can have improved internalization capability and/or increased complement-mediated cell killing and antibody-dependent cellular cytotoxicity (ADCC). See Caron et al., J. Exp Med., 176: 1191-1195 (1992) and Shopes, J. Immunol., 148: 2918-2922 (1992). Homodimeric antibodies with enhanced anti-tumor activity can also be prepared using heterobifunctional cross-linkers as described in Wolff et al. Cancer Research, 53: 2560-2565 (1993). Alternatively, an antibody can be engineered that has dual Fc regions and can thereby have enhanced complement lysis and ADCC capabilities. See Stevenson et al., Anti-Cancer Drug Design, 3: 219-230 (1989).

[0362] 4.13.9 Immunoconjugates

[0363] The invention also pertains to immunoconjugates comprising an antibody conjugated to a cytotoxic agent such as a chemotherapeutic agent, toxin (e.g., an enzymatically active toxin of bacterial, fungal, plant, or animal origin, or fragments thereof), or a radioactive isotope (i.e., a radioconjugate).

[0364] Chemotherapeutic agents useful in the generation of such immunoconjugates have been described above. Enzymatically active toxins and fragments thereof that can be used include diphtheria A chain, nonbinding active fragments of diphtheria toxin, exotoxin A chain (from Pseudomonas aeruginosa), ricin A chain, abrin A chain, modeccin A chain, alpha-sarcin, Aleurites fordii proteins, dianthin proteins, Phytolaca americana proteins (PAPI, PAPII, and PAP-S), momordica charantia inhibitor, curcin, crotin, sapaonaria officinalis inhibitor, gelonin, mitogellin, restrictocin, phenomycin, enomycin, and the tricothecenes. A variety of radionuclides are available for the production of radioconjugated antibodies. Examples include ²¹²Bi, ¹³¹I, ^{131 In,} ⁹⁰Y, and ¹⁸⁹Re.

[0365] Conjugates of the antibody and cytotoxic agent are made using a variety of bifunctional protein-coupling agents such as N-succinimidyl-3-(2-pyridyldithiol) propionate (SPDP), iminothiolane (IT), bifunctional derivatives of imidoesters (such as dimethyl adipimidate HCL), active esters (such as disuccinimidyl suberate), aldehydes (such as glutareldehyde), bis-azido compounds (such as bis (p-azidobenzoyl) hexanediamine), bis-diazonium derivatives (such as bis-(p-diazoniumbenzoyl)-ethylenediamine), diisocyanates (such as tolyene 2,6-diisocyanate), and bis-active fluorine compounds (such as 1,5-difluoro-2,4-dinitrobenzene). For example, a ricin immunotoxin can be prepared as described in Vitetta et al., Science, 238: 1098 (1987). Carbon-14-labeled 1-isothiocyanatobenzyl-3-methyldiethylene triaminepentaacetic acid (MX-DTPA) is an exemplary chelating agent for conjugation of radionucleotide to the antibody. See WO94/11026.

[0366] In another embodiment, the antibody can be conjugated to a “receptor” (such as streptavidin) for utilization in tumor pretargeting wherein the antibody-receptor conjugate is administered to the patient, followed by removal of unbound conjugate from the circulation using a clearing agent and then administration of a “ligand” (e.g., avidin) that is in turn conjugated to a cytotoxic agent.

[0367] 4.14 Computer Readable Sequences

[0368] In one application of this embodiment, a nucleotide sequence of the present invention can be recorded on computer readable media. As used herein, “computer readable media” refers to any medium which can be read and accessed directly by a computer. Such media include, but are not limited to: magnetic storage media, such as floppy discs, hard disc storage medium, and magnetic tape; optical storage media such as CD-ROM; electrical storage media such as RAM and ROM; and hybrids of these categories such as magnetic/optical storage media. A skilled artisan can readily appreciate how any of the presently known computer readable mediums can be used to create a manufacture comprising computer readable medium having recorded thereon a nucleotide sequence of the present invention. As used herein, “recorded” refers to a process for storing information on computer readable medium. A skilled artisan can readily adopt any of the presently known methods for recording information on computer readable medium to generate manufactures comprising the nucleotide sequence information of the present invention.

[0369] A variety of data storage structures are available to a skilled artisan for creating a computer readable medium having recorded thereon a nucleotide sequence of the present invention. The choice of the data storage structure will generally be based on the means chosen to access the stored information. In addition, a variety of data processor programs and formats can be used to store the nucleotide sequence information of the present invention on computer readable medium. The sequence information can be represented in a word processing text file, formatted in commercially-available software such as WordPerfect and Microsoft Word, or represented in the form of an ASCII file, stored in a database application, such as DB2, Sybase, Oracle, or the like. A skilled artisan can readily adapt any number of data processor structuring formats (e.g. text file or database) in order to obtain computer readable medium having recorded thereon the nucleotide sequence information of the present invention.

[0370] By providing any of the nucleotide sequences SEQ ID NO: 1-245 or a representative fragment thereof, or a nucleotide sequence at least 95% identical to any of the nucleotide sequences of SEQ ID NO: 1-245 in computer readable form, a skilled artisan can routinely access the sequence information for a variety of purposes. Computer software is publicly available which allows a skilled artisan to access sequence information provided in a computer readable medium. The examples which follow demonstrate how software which implements the BLAST (Altschul et al., J. Mol. Biol. 215:403-410 (1990)) and BLAZE (Brutlag et al., Comp. Chem. 17:203-207 (1993)) search algorithms on a Sybase system is used to identify open reading frames (ORFs) within a nucleic acid sequence. Such ORFs may be protein encoding fragments and may be useful in producing commercially important proteins such as enzymes used in fermentation reactions and in the production of commercially useful metabolites.

[0371] As used herein, “a computer-based system” refers to the hardware means, software means, and data storage means used to analyze the nucleotide sequence information of the present invention. The minimum hardware means of the computer-based systems of the present invention comprises a central processing unit (CPU), input means, output means, and data storage means. A skilled artisan can readily appreciate that any one of the currently available computer-based systems are suitable for use in the present invention. As stated above, the computer-based systems of the present invention comprise a data storage means having stored therein a nucleotide sequence of the present invention and the necessary hardware means and software means for supporting and implementing a search means. As used herein, “data storage means” refers to memory which can store nucleotide sequence information of the present invention, or a memory access means which can access manufactures having recorded thereon the nucleotide sequence information of the present invention.

[0372] As used herein, “search means” refers to one or more programs which are implemented on the computer-based system to compare a target sequence or target structural motif with the sequence information stored within the data storage means. Search means are used to identify fragments or regions of a known sequence which match a particular target sequence or target motif. A variety of known algorithms are disclosed publicly and a variety of commercially available software for conducting search means are and can be used in the computer-based systems of the present invention. Examples of such software includes, but is not limited to, Smith-Waterman, MacPattern (EMBL), BLASTN and BLASTA (NPOLYPEPTIDEIA). A skilled artisan can readily recognize that any one of the available algorithms or implementing software packages for conducting homology searches can be adapted for use in the present computer-based systems. As used herein, a “target sequence” can be any nucleic acid or amino acid sequence of six or more nucleotides or two or more amino acids. A skilled artisan can readily recognize that the longer a target sequence is, the less likely a target sequence will be present as a random occurrence in the database. The most preferred sequence length of a target sequence is from about 10 to 300 amino acids, more preferably from about 30 to 100 nucleotide residues. However, it is well recognized that searches for commercially important fragments, such as sequence fragments involved in gene expression and protein processing, may be of shorter length.

[0373] As used herein. “a target structural motif,” or “target motif,” refers to any rationally selected sequence or combination of sequences in which the sequence(s) are chosen based on a three-dimensional configuration which is formed upon the folding of the target motif. There are a variety of target motifs known in the art. Protein target motifs include, but are not limited to, enzyme active sites and signal sequences. Nucleic acid target motifs include, but are not limited to, promoter sequences, hairpin structures and inducible expression elements (protein binding sequences).

[0374] 4.15 Triple Helix Formation

[0375] In addition, the fragments of the present invention, as broadly described, can be used to control gene expression through triple helix formation or antisense DNA or RNA, both of which methods are based on the binding of a polynucleotide sequence to DNA or RNA. Polynucleotides suitable for use in these methods are preferably 20 to 40 bases in length and are designed to be complementary to a region of the gene involved in transcription (triple helix—see Lee et al. Nucl. Acids Res. 6:3073 (1979); Cooney et al., Science 15241:456 (1988); and Dervan et al., Science 251:1360 (1991)) or to the mRNA itself (antisense—Olmno, J. Neurochem. 56:560 (1991); Oligodeoxynucleotides as Antisense Inhibitors of Gene Expression, CRC Press, Boca Raton, Fla. (1988)). Triple helix-formation optimally results in a shut-off of RNA transcription from DNA, while antisense RNA hybridization blocks translation of an mRNA molecule into polypeptide. Both techniques have been demonstrated to be effective in model systems. Information contained in the sequences of the present invention is necessary for the design of an antisense or triple helix oligonucleotide.

[0376] 4.16 Diagnostic Assays and Kits

[0377] The present invention further provides methods to identify the presence or expression of one of the ORFs of the present invention, or homolog thereof, in a test sample, using a nucleic acid probe or antibodies of the present invention, optionally conjugated or otherwise associated with a suitable label.

[0378] In general, methods for detecting a polynucleotide of the invention can comprise contacting a sample with a compound that binds to and forms a complex with the polynucleotide for a period sufficient to form the complex, and detecting the complex, so that if a complex is detected, a polynucleotide of the invention is detected in the sample. Such methods can also comprise contacting a sample under stringent hybridization conditions with nucleic acid primers that anneal to a polynucleotide of the invention under such conditions, and amplifying annealed polynucleotides, so that if a polynucleotide is amplified, a polynucleotide of the invention is detected in the sample.

[0379] In general, methods for detecting a polypeptide of the invention can comprise contacting a sample with a compound that binds to and forms a complex with the polypeptide for a period sufficient to form the complex, and detecting the complex, so that if a complex is detected, a polypeptide of the invention is detected in the sample.

[0380] In detail, such methods comprise incubating a test sample with one or more of the antibodies or one or more of the nucleic acid probes of the present invention and assaying for binding of the nucleic acid probes or antibodies to components within the test sample.

[0381] Conditions for incubating a nucleic acid probe or antibody with a test sample vary. Incubation conditions depend on the format employed in the assay, the detection methods employed, and the type and nature of the nucleic acid probe or antibody used in the assay. One skilled in the art still recognize that any one of the commonly available hybridization, amplification or immunological assay formats can readily be adapted to employ the nucleic acid probes or antibodies of the present invention. Examples of such assays can be found in Chard, T., An Introduction to Radioimmunoassay and Related Techniques. Elsevier Science Publishers, Amsterdam, The Netherlands (1986); Bullock, G. R. et al., Techniques in Immunocytochemistry, Academic Press, Orlando, Fla. Vol. 1 (1982), Vol. 2 (1983), Vol. 3 (1985); Tijssen, P., Practice and Theory of immunoassays: Laboratory Techniques in Biochemistry and Molecular Biology, Elsevier Science Publishers, Amsterdam, The Netherlands (1985). The test samples of the present invention include cells, protein or membrane extracts of cells, or biological fluids such as sputum, blood, serum, plasma, or urine. The test sample used in the above-described method will vary based on the assay format, nature of the detection method and the tissues, cells or extracts used as the sample to be assayed. Methods for preparing protein extracts or membrane extracts of cells are well known in the art and can be readily be adapted in order to obtain a sample which is compatible with the system utilized.

[0382] In another embodiment of the present invention, kits are provided which contain the necessary reagents to carry out the assays of the present invention. Specifically, the invention provides a compartment kit to receive, in close confinement, one or more containers which comprises: (a) a first container comprising one of the probes or antibodies of the present invention; and (b) one or more other containers comprising one or more of the following: wash reagents, reagents capable of detecting presence of a bound probe or antibody.

[0383] In detail, a compartment kit includes any kit in which reagents are contained in separate containers. Such containers include small glass containers, plastic containers or strips of plastic or paper. Such containers allows one to efficiently transfer reagents from one compartment to another compartment such that the samples and reagents are not cross-contaminated, and the agents or solutions of each container can be added in a quantitative fashion from one compartment to another. Such containers will include a container which will accept the test sample, a container which contains the antibodies used in the assay, containers which contain wash reagents (such as phosphate buffered saline, Tris-buffers, etc.), and containers which contain the reagents used to detect the bound antibody or probe. Types of detection reagents include labeled nucleic acid probes, labeled secondary antibodies, or in the alternative, if the primary antibody is labeled, the enzymatic, or antibody binding reagents which are capable of reacting with the labeled antibody. One skilled in the art will readily recognize that the disclosed probes and antibodies of the present invention can be readily incorporated into one of the established kit formats which are well known in the art.

[0384] 4.17 Medical Imaging

[0385] The novel polypeptides and binding partners of the invention are useful in medical imaging of sites expressing the molecules of the invention (e.g. where the polypeptide of the invention is involved in the immune response, for imaging sites of inflammation or infection). See, e.g., Kunkel et al., U.S. Pat. No. 5,413,778. Such methods involve chemical attachment of a labeling or imaging agent, administration of the labeled polypeptide to a subject in a pharmaceutically acceptable carrier, and imaging the labeled polypeptide in vivo at the target site.

[0386] 4.18 Screening Assays

[0387] Using the isolated proteins and polynucleotides of the invention, the present invention further provides methods of obtaining and identifying agents which bind to a polypeptide encoded by an ORF corresponding to any of the nucleotide sequences set forth in SEQ ID NO: 1-245, or bind to a specific domain of the polypeptide encoded by the nucleic acid. In detail, said method comprises the steps of:

[0388] (a) contacting an agent with an isolated protein encoded by an ORF of the present invention, or nucleic acid of the invention; and

[0389] (b) determining whether the agent binds to said protein or said nucleic acid.

[0390] In general, therefore, such methods for identifying compounds that bind to a polynucleotide of the invention can comprise contacting a compound with a polynucleotide of the invention for a time sufficient to form a polynucleotide/compound complex, and detecting the complex, so that if a polynucleotide/compound complex is detected, a compound that binds to a polynucleotide of the invention is identified.

[0391] Likewise, in general, therefore, such methods for identifying compounds that bind to a polypeptide of the invention can comprise contacting a compound with a polypeptide of the invention for a time sufficient to form a polypeptide/compound complex, and detecting the complex, so that if a polypeptide/compound complex is detected, a compound that binds to a polynucleotide of the invention is identified.

[0392] Methods for identifying compounds that bind to a polypeptide of the invention can also comprise contacting a compound with a polypeptide of the invention in a cell for a time sufficient to form a polypeptide/compound complex, wherein the complex drives expression of a receptor gene sequence in the cell, and detecting the complex by detecting reporter gene sequence expression, so that if a polypeptide/compound complex is detected, a compound that binds a polypeptide of the invention is identified.

[0393] Compounds identified via such methods can include compounds which modulate the activity of a polypeptide of the invention (that is, increase or decrease its activity, relative to activity observed in the absence of the compound). Alternatively, compounds identified via such methods can include compounds which modulate the expression of a polynucleotide of the invention (that is, increase or decrease expression relative to expression levels observed in the absence of the compound). Compounds, such as compounds identified via the methods of the invention, can be tested using standard assays well known to those of skill in the art for their ability to modulate activity/expression.

[0394] The agents screened in the above assay can be, but are not limited to, peptides, carbohydrates, vitamin derivatives, or other pharmaceutical agents. The agents can be selected and screened at random or rationally selected or designed using protein modeling techniques.

[0395] For random screening, agents such as peptides, carbohydrates, pharmaceutical agents and the like are selected at random and are assayed for their ability to bind to the protein encoded by the ORF of the present invention. Alternatively, agents may be rationally selected or designed. As used herein, an agent is said to be “rationally selected or designed” when the agent is chosen based on the configuration of the particular protein. For example, one skilled in the art can readily adapt currently available procedures to generate peptides, pharmaceutical agents and the like, capable of binding to a specific peptide sequence, in order to generate rationally designed antipeptide peptides, for example see Hurby et al., Application of Synthetic Peptides: Antisense Peptides,” In Synthetic Peptides, A User's Guide, W. H. Freeman, N.Y. (1992), pp. 289-307, and Kaspczak et al., Biochemistry 28:9230-8 (1989), or pharmaceutical agents, or the like.

[0396] In addition to the foregoing, one class of agents of the present invention, as broadly described, can be used to control gene expression through binding to one of the ORFs or EMFs of the present invention. As described above, such agents can be randomly screened or rationally designed/selected. Targeting the ORF or EMF allows a skilled artisan to design sequence specific or element specific agents, modulating the expression of either a single ORF or multiple ORFs which rely on the same EMF for expression control. One class of DNA binding agents are agents which contain base residues which hybridize or form a triple helix formation by binding to DNA or RNA. Such agents can be based on the classic phosphodiester, ribonucleic acid backbone, or can be a variety of sulfhydryl or polymeric derivatives which have base attachment capacity.

[0397] Agents suitable for use in these methods preferably contain 20 to 40 bases and are designed to be complementary to a region of the gene involved in transcription (triple helix—see Lee et al., Nucl. Acids Res. 6:3073 (1979); Cooney et al. Science 241:456 (1988); and Dervan et al., Science 251:1360 (1991)) or to the mRNA itself (antisense—Okano, J. Neurochem. 56:560 (1991); Oligodeoxynucleotides as Antisense Inhibitors of Gene Expression, CRC Press, Boca Raton, Fla. (1988)). Triple helix-formation optimally results in a shut-off of RNA transcription from DNA, while antisense RNA hybridization blocks translation of an mRNA molecule into polypeptide. Both techniques have been demonstrated to be effective in model systems.

[0398] Information contained in the sequences of the present invention is necessary for the design of an antisense or triple helix oligonucleotide and other DNA binding agents.

[0399] Agents which bind to a protein encoded by one of the ORFs of the present invention can be used as a diagnostic agent. Agents which bind to a protein encoded by one of the ORFs of the present invention can be formulated using known techniques to generate a pharmaceutical composition.

[0400] 4.19 Use of Nucleic Acids as Probes

[0401] Another aspect of the subject invention is to provide for polypeptide-specific nucleic acid hybridization probes capable of hybridizing with naturally occurring nucleotide sequences. The hybridization probes of the subject invention may be derived from any of the nucleotide sequences SEQ ID NO: 1-245. Because the corresponding gene is only expressed in a limited number of tissues, a hybridization probe derived from any of the nucleotide sequences SEQ ID NO: 1-245 can be used as an indicator of the presence of RNA of cell type of such a tissue in a sample.

[0402] Any suitable hybridization technique can be employed, such as, for example, in situ hybridization. PCR as described in U.S. Pat. Nos. 4,683,195 and 4,965,188 provides additional uses for oligonucleotides based upon the nucleotide sequences. Such probes used in PCR may be of recombinant origin, may be chemically synthesized, or a mixture of both. The probe will comprise a discrete nucleotide sequence for the detection of identical sequences or a degenerate pool of possible sequences for identification of closely related genomic sequences.

[0403] Other means for producing specific hybridization probes for nucleic acids include the cloning of nucleic acid sequences into vectors for the production of MRNA probes. Such vectors are known in the art and are commercially available and may be used to synthesize RNA probes in vitro by means of the addition of the appropriate RNA polymerase as T7 or SP6 RNA polymerase and the appropriate radioactively labeled nucleotides. The nucleotide sequences may be used to construct hybridization probes for mapping their respective genomic sequences. The nucleotide sequence provided herein may be mapped to a chromosome or specific regions of a chromosome using well known genetic and/or chromosomal mapping techniques. These techniques include in situ hybridization, linkage analysis against known chromosomal markers, hybridization screening with libraries or flow-sorted chromosomal preparations specific to known chromosomes, and the like. The technique of fluorescent in situ hybridization of chromosome spreads has been described, among other places, in Verma et al (1988) Human Chromosomes: A Manual of Basic Techniques, Pergamon Press, New York N.Y.

[0404] Fluorescent in situ hybridization of chromosomal preparations and other physical chromosome mapping techniques may be correlated with additional genetic map data. Examples of genetic map data can be found in the 1994 Genome Issue of Science (265:1981 f). Correlation between the location of a nucleic acid on a physical chromosomal map and a specific disease (or predisposition to a specific disease) may help delimit the region of DNA associated with that genetic disease. The nucleotide sequences of the subject invention may be used to detect differences in gene sequences between normal, carrier or affected individuals.

[0405] 4.20 Preparation of Support Bound Oligonucleotides

[0406] Oligonucleotides, i.e. small nucleic acid segments, may be readily prepared by, for example, directly synthesizing the oligonucleotide by chemical means, as is commonly practiced using an automated oligonucleotide synthesizer.

[0407] Support bound oligonucleotides may be prepared by any of the methods known to those of skill in the art using any suitable support such as glass, polystyrene or Teflon. One strategy is to precisely spot oligonucleotides synthesized by standard synthesizers. Immobilization can be achieved using passive adsorption (Inouye & Hondo, (1990) J. Clin. Microbiol. 28(6) 1469-72); using UV light (Nagata et al., 1985; Dahlen et al., 1987; Morrissey & Collins, (1989) Mol. Cell Probes 3(2) 189-207) or by covalent binding of base modified DNA (Keller et al, 1988; 1989); all references being specifically incorporated herein.

[0408] Another strategy that may be employed is the use of the strong biotin-streptavidin interaction as a linker. For example, Broude et al. (1994) Proc. Natl. Acad. Sci. USA 91(8) 3072-6, describe the use of biotinylated probes, although these are duplex probes, that are immobilized on streptavidin-coated magnetic beads. Streptavidin-coated beads may be purchased from Dynal. Oslo. Of course, this same linking chemistry is applicable to coating any surface with streptavidin. Biotinylated probes may be purchased from various sources, such as, e.g., Operon Technologies (Alameda, Calif.).

[0409] Nunc Laboratories (Naperville, Ill.) is also selling suitable material that could be used. Nunc Laboratories have developed a method by which DNA can be covalently bound to the microwell surface termed Covalink NH. CovaLink NH is a polystyrene surface grafted with secondary amino groups (>NH) that serve as bridge-heads for further covalent coupling. CovaLink Modules may be purchased from Nunc Laboratories. DNA molecules may be bound to CovaLink exclusively at the 5′-end by a phosphoramidate bond, allowing immobilization of more than 1 μmol of DNA (Rasmussen et al., (1991) Anal. Biochem. 198(1) 138-42).

[0410] The use of CovaLink NH strips for covalent binding of DNA molecules at the 5′-end has been described (Rasmussen et al. (1991). In this technology, a phosphoramidate bond is employed (Chu et al. (1983) Nucleic Acids Res. 11 (8) 6513-29). This is beneficial as immobilization using only a single covalent bond is preferred. The phosphoramidate bond joins the DNA to the CovaLink NH secondary amino groups that are positioned at the end of spacer arms covalently grafted onto the polystyrene surface through a 2 nm long spacer arm. To link an oligonucleotide to CovaLink NH via an phosphoramidate bond, the oligonucleotide terminus must have a 5′-end phosphate group. It is, perhaps, even possible for biotin to be covalently bound to CovaLink and then streptavidin used to bind the probes.

[0411] More specifically, the linkage method includes dissolving DNA in water (7.5 ng/μl) and denaturing for 10 min. at 95° C. and cooling on ice for 10 min. Ice-cold 0.1 M 1-methylimidazole pH 7.0 (1-MeIm₇), is then added to a final concentration of 10 mM I-MeIm₇. The single-stranded DNA solution is then dispensed into CovaLink NH strips (75 μl/well) standing on ice.

[0412] Carbodiimide 0.2 M 1-ethyl-3-(3-dimethylaminopropyl)-carbodiimide (EDC), dissolved in 10 mM 1-MeIm₇, is made fresh and 25 μl added per well. The strips are incubated for 5 hours at 50° C. After incubation the strips are washed using, e.g., Nunc-Immuno Wash; first the wells are washed 3 times, then they are soaked with washing solution for 5 min., and finally they are washed 3 times (where in the washing solution is 0.4 N NaOH, 0.25% SDS heated to 50° C.).

[0413] It is contemplated that a further suitable method for use with the present invention is that described in PCT Patent Application WO 90/03382 (Southern & Maskos), incorporated herein by reference. This method of preparing an oligonucleotide bound to a support involves attaching a nucleoside 3′-reagent through the phosphate group by a covalent phosphodiester link to aliphatic hydroxyl groups carried by the support. The oligonucleotide is then synthesized on the supported nucleoside and protecting groups removed from the synthetic oligonucleotide chain under standard conditions that do not cleave the oligonucleotide from the support. Suitable reagents include nucleoside phosphoramidite and nucleoside hydrogen phosphorate.

[0414] An on-chip strategy for the preparation of DNA probe for the preparation of DNA probe arrays may be employed. For example, addressable laser-activated photodeprotection may be employed in the chemical synthesis of oligonucleotides directly on a glass surface, as described by Fodor et al. (1991) Science 251(4995) 767-73, incorporated herein by reference. Probes may also be immobilized on nylon supports as described by Van Ness et al (1991) Nucleic Acids Res. 19(12) 3345-50; or linked to Teflon using the method of Duncan & Cavalier (1988) Anal. Biochem. 169(1) 104-8; all references being specifically incorporated herein.

[0415] To link an oligonucleotide to a nylon support, as described by Van Ness et al. (1991), requires activation of the nylon surface via alkylation and selective activation of the 5′-amine of oligonucleotides with cyanuric chloride.

[0416] One particular way to prepare support bound oligonucleotides is to utilize the light-generated synthesis described by Pease et al., (1994) PNAS USA 91(11) 5022-6, incorporated herein by reference). These authors used current photolithographic techniques to generate arrays of immobilized oligonucleotide probes (DNA chips). These methods, in which light is used to direct the synthesis of oligonucleotide probes in high-density, miniaturized arrays, utilize photolabile 5′-protected N-acyl-deoxynucleoside phosphoramidites, surface linker chemistry and versatile combinatorial synthesis strategies. A matrix of 256 spatially defined oligonucleotide probes may be generated in this manner.

[0417] 4.21 Preparation of Nucleic Acid Fragments

[0418] The nucleic acids may be obtained from any appropriate source, such as cDNAs, genomic DNA, chromosomal DNA, microdissected chromosome bands, cosmid or YAC inserts, and RNA, including mRNA without any amplification steps. For example, Sambrook et al. (1989) describes three protocols for the isolation of high molecular weight DNA from mammalian cells (p. 9.14-9.23).

[0419] DNA fragments may be prepared as clones in M13, plasmid or lambda vectors and/or prepared directly from genomic DNA or cDNA by PCR or other amplification methods. Samples may be prepared or dispensed in multiwell plates. About 100-1000 ng of DNA samples may be prepared in 2-500 ml of final volume.

[0420] The nucleic acids would then be fragmented by any of the methods known to those of skill in the art including, for example, using restriction enzymes as described at 9.24-9.28 of Sambrook et al. (1989), shearing by ultrasound and NaOH treatment.

[0421] Low pressure shearing is also appropriate, as described by Schriefer et al. (1990) Nucleic Acids Res. 18(24) 7455-6, incorporated herein by reference). In this method, DNA samples are passed through a small French pressure cell at a variety of low to intermediate pressures. A lever device allows controlled application of low to intermediate pressures to the cell. The results of these studies indicate that low-pressure shearing is a useful alternative to sonic and enzymatic DNA fragmentation methods.

[0422] One particularly suitable way for fragmenting DNA is contemplated to be that using the two base recognition endonuclease. CviJI, described by Fitzgerald et al. (1992) Nucleic Acids Res. 20(14) 3753-62. These authors described an approach for the rapid fragmentation and fractionation of DNA into particular sizes that they contemplated to be suitable for shotgun cloning and sequencing.

[0423] The restriction endonuclease CviJI normally cleaves the recognition sequence PuGCPy between the G and C to leave blunt ends. Atypical reaction conditions, which alter the specificity of this enzyme (CviJI**), yield a quasi-random distribution of DNA fragments form the small molecule pUC19 (2688 base pairs). Fitzgerald et al. (1992) quantitatively evaluated the randomness of this fragmentation strategy, using a CviJI** digest of pUC19 that was size fractionated by a rapid gel filtration method and directly ligated, without end repair, to a lac Z minus M13 cloning vector. Sequence analysis of 76 clones showed that CviJI** restricts pyGCPy and PuGCPu, in addition to PuGCPy sites, and that new sequence data is accumulated at a rate consistent with random fragmentation.

[0424] As reported in the literature, advantages of this approach compared to sonication and agarose gel fractionation include: smaller amounts of DNA are required (0.2-0.5 μg instead of 2-5 μg); and fewer steps are involved (no preligation, end repair, chemical extraction, or agarose gel electrophoresis and elution are needed.

[0425] Irrespective of the manner in which the nucleic acid fragments are obtained or prepared, it is important to denature the DNA to give single stranded pieces available for hybridization. This is achieved by incubating the DNA solution for 2-5 minutes at 80-90° C. The solution is then cooled quickly to 2° C. to prevent renaturation of the DNA fragments before they are contacted with the chip. Phosphate groups must also be removed from genomic DNA by methods known in the art.

[0426] 4.22 Preparation of DNA Arrays

[0427] Arrays may be prepared by spotting DNA samples on a support such as a nylon membrane. Spotting may be performed by using arrays of metal pins (the positions of which correspond to an array of wells in a microtiter plate) to repeated by transfer of about 20 nl of a DNA solution to a nylon membrane. By offset printing, a density of dots higher than the density of the wells is achieved. One to 25 dots may be accommodated in 1 mm², depending on the type of label used. By avoiding spotting in some preselected number of rows and columns, separate subsets (subarrays) may be formed. Samples in one subarray may be the same genomic segment of DNA (or the same gene) from different individuals, or may be different, overlapped genomic clones. Each of the subarrays may represent replica spotting of the same samples. In one example, a selected gene segment may be amplified from 64 patients. For each patient, the amplified gene segment may be in one 96-well plate (all 96 wells containing the same sample). A plate for each of the 64 patients is prepared. By using a 96-pin device, all samples may be spotted on one 8×12 cm membrane. Subarrays may contain 64 samples, one from each patient. Where the 96 subarrays are identical, the dot span may be 1 mm² and there may be a 1 mm space between subarrays.

[0428] Another approach is to use membranes or plates (available from NUNC, Naperville. Ill.) which may be partitioned by physical spacers e.g. a plastic grid molded over the membrane, the grid being similar to the sort of membrane applied to the bottom of multiwell plates, or hydrophobic strips. A fixed physical spacer is not preferred for imaging by exposure to flat phosphor-storage screens or x-ray films.

[0429] The present invention is illustrated in the following examples. Upon consideration of the present disclosure, one of skill in the art will appreciate that many other embodiments and variations may be made in the scope of the present invention. Accordingly, it is intended that the broader aspects of the present invention not be limited to the disclosure of the following examples. The present invention is not to be limited in scope by the exemplified embodiments which are intended as illustrations of single aspects of the invention, and compositions and methods which are functionally equivalent are within the scope of the invention. Indeed, numerous modifications and variations in the practice of the invention are expected to occur to those skilled in the art upon consideration of the present preferred embodiments. Consequently, the only limitations which should be placed upon the scope of the invention are those which appear in the appended claims.

[0430] All references cited within the body of the instant specification are hereby incorporated by reference in their entirety.

### 5. EXAMPLES

### 5.1 Example 1

[0431] Novel Nucleic Acid Sequences Obtained from Various Libraries

[0432] A plurality of novel nucleic acids were obtained from cDNA libraries prepared from various human tissues and in some cases isolated from a genomic library derived from human chromosome using standard PCR, SBH sequence signature analysis and Sanger sequencing techniques. The inserts of the library were amplified with PCR using primers specific for the vector sequences which flank the inserts. Clones from cDNA libraries were spotted on nylon membrane filters and screened with oligonucleotide probes (e.g., 7-mers) to obtain signature sequences. The clones were clustered into groups of similar or identical sequences. Representative clones were selected for sequencing.

[0433] In some cases, the 5′ sequence of the amplified inserts was then deduced using a typical Sanger sequencing protocol. PCR products were purified and subjected to fluorescent dye terminator cycle sequencing. Single pass gel sequencing was done using a 377 Applied Biosystems (ABI) sequencer to obtain the novel nucleic acid sequences.

### 5.2 Example 2

[0434] Assemblage of Novel Nucleic Acids

[0435] The nucleic acids of the present invention, were assembled using an EST sequence as a seed. Then a recursive algorithm was used to extend the seed EST into an extended assemblage, by pulling additional sequences from different databases (i.e., Hyseq's database containing EST sequences, dbEST, gb pri, UniGene, and exons from public domain genomic sequences predicated by GenScan) that belong to this assemblage. The algorithm terminated when there was no additional sequences from the above databases that would extend the assemblage. Further, inclusion of component sequences into the assemblage was based on a BLASTN hit to the extending assemblage with BLAST score greater than 300 and percent identity greater than 95%.

[0436] Using PHRAP (Univ. of Washington) or CAP4 (Paracel), full-length gene sequences and their corresponding protein sequences were generated from the assemblage. Any frame shifts and incorrect stop codons were corrected by hand editing. During editing, the sequence was checked using FASTXY algorithm against Genbank (i.e., dbEST, gb pri, UniGene, and Genpept). Other computer programs which may have been used in the editing process were phredPhrap and Consed (University of Washington) and ed-ready, ed-ext and gc-zip-2 (Hyseq, Inc.). In some cases RACE (Rapid Amplification of cDNA Ends) was performed to further extend the sequence in the 5′ direction. The full-length nucleotide sequences are shown in the Sequence Listing as SEQ ID NO: 1-245. The corresponding polypeptide sequences are SEQ ID NO: 246-490.

[0437] Table 1 shows the various tissue sources of SEQ ID NO: 1-245.

[0438] The nearest neighbor results for polypeptides encoded by SEQ ID NO: 1-245 (i.e. SEQ ID NO: 246-490) were obtained by a BLASTP (version 2.0al 19MP-WashU) search against Genpept release 124 using BLAST algorithm. The nearest neighbor result showed the closest homologue with functional annotation for SEQ ID NO: 1-245 from Genpept. The translated amino acid sequences for which the nucleic acid sequence encodes are shown in the Sequence Listing. The homologs with identifiable functions for SEQ ID NO: 1-245 are shown in Table 2 below.

[0439] Using eMatrix software package (Stanford University, Stanford, Calif.) (Wu et al., J. Comp. Biol., Vol. 6 pp. 219-235 (1999) herein incorporated by reference), polypeptides encoded by SEQ ID NO: 1-245 (i.e. SEQ ID NO: 246-490) were examined to determine whether they had identifiable signature regions. Table 3 shows the signature region found in the indicated polypeptide sequences, the description of the signature, the eMatrix p-value(s) and the position(s) of the signature within the polypeptide sequence.

[0440] Using the pFam software program (Sonnhammer et al., Nucleic Acids Res., Vol. 26(1) pp. 320-322 (1998) herein incorporated by reference) polypeptides encoded by SEQ ID NO: 1-245 (i.e. SEQ ID NO: 246-490) were examined for domains with homology to certain peptide domains. Table 4 shows the name of the domain found, the description, the p-value and the pFam score for the identified domain within the sequence.

[0441] The GeneAtlasr™ software package (Molecular Simulations Inc. (MSI). San Diego, Calif.) was used to predict the three-dimensional structure models for the polypeptides encoded by SEQ ID NO 1-216 (i.e. SEQ ID NO: 246-490). Models were generated by (I) PSI-BLAST which is a multiple alignment sequence profile-based searching developed by Altschul et al, (Nucl. Acids. Res. 25, 3389-3408 (1997)), (2) High Throughput Modeling (HTM) (Molecular Simulations Inc. (MSI) San Diego, Calif.,) which is an automated sequence and structure searching procedure (http://www.msi.coni/), and (3) SeqFold™ which is a fold recognition method described by Fischer and Eisenberg (J. Mol. Biol. 209, 779-791 (1998)). This analysis was carried out, in part, by comparing the polypeptides of the invention with the known NMR (nuclear magnetic resonance) and x-ray crystal three-dimensional structures as templates. Table 5 shows, “PDB ID”, the Protein DataBase (PDB) identifier given to template structure; “Chain ID”, identifier of the subcomponent of the PDB template structure; “Compound Information”, information of the PDB template structure and/or its subcomponents; “PDB Function Annotation” gives function of the PDB template as annotated by the PDB files (http:/www.rcsb.org/PDB/); start and end amino acid position of the protein sequence aligned; PSI-BLAST score, the verify score, the SeqFold score, and the Potential(s) of Mean Force (PMF). The verify score is produced by GeneAtlas™ software (MSI), is based on Dr. Eisenberg's Profile-3D threading program developed in Dr. David Eisenberg's laboratory (U.S. Pat. No. 5,436,850 and Luthy, Bowie, and Eisenberg, Nature, 356:83-85 (1992)) and a publication by R. Sanchez and A. Sali, Proc. Natl. Acad. Sci. USA, 95:13597-12502. The verify score produced by GeneAtlas normalizes the verify score for proteins with different lengths so that a unified cutoff can be used to select good models as follows:

Verify score (normalized)=(raw score−1/2 high score)/(1/2 high score)

[0442] The PFM score, produced by GeneAtlas™ software (MSI), is a composite scoring function that depends in part on the compactness of the model, sequence identity in the alignment used to build the model, pairwise and surface mean force potentials (MFP). As given in Table 5, a verify score between 0 to 1.0, with 1 being the best, represents a good model. Similarly, a PMF score between 0 to 1.0, with 1 being the best, represents a good model. A SeqFold™ score of more than 50 is considered significant. A good model may also be determined by one of skill in the art based all the information in Table 5 taken in totality.

[0443] The nucleotide sequence within the sequences that codes for signal peptide sequences and their cleavage sites can be determined from using Neural Network SignalP V1.1 program (from Center for Biological Sequence Analysis. The Technical University of Denmark). The process for identifying prokaryotic and eukaryotic signal peptides and their cleavage sites are also disclosed by Henrik Nielson. Jacob Engelbrecht, Soren Brunak, and Gunnar von Heijne in the publication “Identification of prokaryotic and eukaryotic signal peptides and prediction of their cleavage sites” Protein Engineering, Vol. 10, no. 1, pp. 1-6 (1997), incorporated herein by reference. A maximum S score and a mean S score, as described in the Nielson et al, as reference, were obtained for the polypeptide sequences. Table 6 shows the position of the signal peptide in each of the polypeptides and the maximum score and mean score associated with that signal peptide.

[0444] Table 7 correlates each of SEQ ID NO: 1-245 to a specific chromosomal location.

[0445] Table 8 is a correlation table of the novel polynucleotide sequences SEQ ID NO: 1-245, and their corresponding priority full length nucleotide sequences in the priority application U.S. Ser. No. 09/654,935, the contents of which is incorporated herein by reference in its entirety.

TABLE 1

| | Tissue/RNA | Library | |
|---|---|---|---|
| Tissue Origin | Source | Name | SEQ ID NO: |
| adult brain | GIBCO | AB3001 | 8 24 38 42 56 63-64 93-94 113 130 183 195-196 206 210 |
| | | | 227 233 236 240 |
| adult brain | GIBCO | ABD003 | 2-4 15 19-21 29 31-32 34-39 41-43 45 54 56 67 80 82 84 88 |
| | | | 94 103-104 107 113 117 130-131 154 159 178 195 199 206 |
| | | | 210 220-221 223 |
| adult brain | Clontech | ABR001 | 2-3 17 33 35 43 56 62 67 84 113 191 220 |
| adult brain | Clontech | ABR006 | 2-4 34 82 89 101-102 113 127 146 152 158 162 181 191 |
| | | | 197-198 200-201 214 221-223 234 241 |
| adult brain | Clontech | ABR008 | 2-4 9-12 15 17 19 21 24 29 36-41 54 64 70 74-75 77 79-80 |
| | | | 82 84 93-94 97-98 101-102 104 107 109 117 121-124 127 |
| | | | 131 140 143-144 146 148-149 151-152 155 158 162 164 |
| | | | 167 169 178 193 196 200-202 204 206 221 223-225 227 |
| | | | 229 233 |
| adult brain | BioChain | ABR012 | 2-3 54 |
| adult brain | BioChain | ABR013 | 17 43 209 240 |
| adult brain | Invitrogen | ABR014 | 23 43 227 232 |
| adult brain | Invitrogen | ABR015 | 43 54 65 67 89 142 159 232 |
| adult brain | Invitrogen | ABR016 | 2-3 28 54 56 64 104 159 229 |
| adult brain | Invitrogen | ABT004 | 2-3 23 30 33 36-38 40 100 145 152 154 177 191 206 220 |
| | | | 242 |
| cultured | Stratagene | ADP001 | 2-3 15 29 36 38 40 43 56 100 104-105 130 142-144 158-159 |
| preadipocytes | | | 177 182 206 236 240 |
| adrenal gland | Clontech | ADR002 | 11-12 19-20 28 37-38 42 50 56 70 76 82 84 102 104-105 |
| | | | 127 130 145 148-150 181 183 189 191 209-210 224-225 |
| adult heart | GIBCO | AHR001 | 2-5 8-9 11-12 19-22 24 29 36 38 40 43 45 47 54 56 62-63 |
| | | | 70 72 74 76 79 82 84 86 92 94 101-104 107 113 127 130-131 |
| | | | 137-138 140 143-144 148-149 159 166 169 177-178 |
| | | | 183 196 206-207 210 214 229-233 236-237 |
| adult kidney | GIBCO | AKD001 | 2-3 7-9 11-12 15 18 20-21 24 26-27 29 31-33 36-43 52 54 |
| | | | 56 61-62 64 80 82 91 95 98 101-104 107 113 117 130-131 |
| | | | 143-144 146 154 159 169 178 181 183 191 195-199 204 |
| | | | 206 210 214 220 223-225 227 229 233 240 244 |
| adult kidney | Invitrogen | AKT002 | 6 8-9 11-12 18 33 36-37 40 43 46 56 64 82 84 86-87 91 107 |
| | | | 113 130 142 144 148-149 152 159 167 169 183 191 193 |
| | | | 206 223 226 228 232 240-241 244 |
| adult lung | GIBCO | ALG001 | 5 15 20 29 43 47 54 56 88 103 130 173 177 183 191 214 |
| | | | 232 240 244 |
| lymph node | Clontech | ALN001 | 8 29 36 46 104 130 159 183 206 214 240 |
| young liver | GIBCO | ALV001 | 2-3 11-12 15 19 37-38 40 43 47 56 62 70 94 103 107 112 |
| | | | 143-144 162 181 183 191 195 206 214 220 224-225 236-237 |
| | | | 243 |
| adult liver | Invitrogen | ALV002 | 2-3 10-12 15 20 22 26-27 37 50 89 143 148-149 173 181 |
| | | | 183 191 193 206 217 220 240 244 |
| adult liver | Clontech | ALV003 | 21 181 232 |
| adult ovary | Invitrogen | AOV001 | 2-3 8 10-12 14-15 19-23 26-29 31-32 34 36-43 47 50 56 62-64 |
| | | | 67 70 75 78 82 84 86 89 94 101-102 104 107 109 113 |
| | | | 118 125 130-131 140 142 144 146 148-150 152 155 158-159 |
| | | | 162 166-167 169 173 177-178 182-183 189 193 195 |
| | | | 204 206 210 214 223-225 227 232 240-244 |
| adult placenta | Clontech | APL001 | 43 159 169 206 240 |
| placenta | Invitrogen | APL002 | 20 26-27 36 38 64 71 100 178 196 220 228 233 |
| adult spleen | GIBCO | ASP001 | 2-3 8 26-27 29 35 37 42-43 46-47 54 56 62 64 87 94 104 |
| | | | 130 143-144 152 159 183 199 206 214 220 227 232 236 |
| | | | 244 |
| adult testis | GIBCO | ATS001 | 5 8 11-12 20 23-24 29 31-32 37-38 41 43 54 56 62 64 86 89 |
| | | | 104 107 130-131 137-138 159 178 183 195 210 229 232 |
| | | | 236-237 |
| adult bladder | Invitrogen | BLD001 | 8 54 159 195 206 |
| bone marrow | Clontech | BMD001 | 2-5 8-12 19 22 26-27 29 31-32 34 36-38 42-43 46-47 56 63-64 |
| | | | 70 80 86-87 89 91 93-94 98 103-104 107 109 113 118 |
| | | | 130-131 144 146 152 159 162 167 178 182 193 199 206-207 |
| | | | 210 214 220 223 228 232 240 244 |
| bone marrow | Clontech | BMD002 | 2-3 5 8 11-12 15 21 26-27 29 36 40 42 45-46 50 54 56 91 |
| | | | 94 97-98 104-105 107 109 120 124 137-138 140 142 144 |
| | | | 159 165 167 169 173 183 189 191 193 196 204-206 226 |
| | | | 232-234 236-237 244 |
| bone marrow | Clontech | BMD004 | 232 |
| bone marrow | Clonetech | BMD007 | 43 232 |
| adult colon | Invitrogen | CLN001 | 38 43 45-46 50 84 87 143 193 195 222 244 |
| mixture of | various | CTL016 | 20 |
| 16 tissues- | vendors | | |
| mRNAs* | | | |
| mixture of | various | CTL021 | 46 54 159 232 |
| 16 tissues- | vendors | | |
| mRNAs* | | | |
| mixture of | various | CTL028 | 159 237 |
| 16 tissues- | vendors | | |
| mRNAs* | | | |
| adult cervix | BioChain | CVX001 | 2-3 8 11-12 15 21 24 31-32 35-36 39-43 46 56 62-65 70 82 |
| | | | 87 89 93-94 98 105 107 120 125-126 131 144 148-150 152 |
| | | | 159 165 178 182-183 189 191 193 195 223 236 240 |
| endothelial | Strategene | EDT001 | 2-4 8 10-12 15 21-24 28-30 33-34 36-37 40 42-43 45 47 50 |
| cells | | | 56 62 64 67 70 72 80 82 86 94 103-104 107 109 126 130-131 |
| | | | 142-144 146 148-149 152 154 158-159 162 169 177-178 |
| | | | 182-183 191 193 195-199 206 210 214 223-226 229 |
| | | | 233 236 240-242 |
| fetal brain | Clontech | FBR001 | 43 130 199 |
| fetal brain | Clontech | FBR004 | 31-32 |
| fetal brain | Clontech | FBR006 | 2-4 8 10 29 39 41 43 49 70 77 80 82 84 89 94 104-105 118 |
| | | | 121-123 142 150-152 154-155 165 178 186 200-201 204 |
| | | | 206-207 210 |
| fetal brain | Invitrogen | FBT002 | 2-3 8 11-12 29 37 43 67 82 89 134 142-143 152 159 177 |
| | | | 189 191 193 199 206 210 220 227 |
| fetal heart | Invitrogen | FHR001 | 41 |
| fetal kidney | Clontech | FKD001 | 2-3 10-12 17 29 38 40 43 54 69 75 80 127 159 229 231 236 |
| | | | 240 |
| fetal kidney | Clontech | FKD002 | 56 |
| fetal kidney | Invitrogen | FKD007 | 19 36 43 56 159 |
| fetal lung | Clontech | FLG001 | 2-3 54 69 109 113 |
| fetal lung | Invitrogen | FLG003 | 10 21 35 43 50 54 69 80 92 125-126 143 148-149 158-159 |
| | | | 199 221 231-232 |
| fetal liver- | Columbia | FLS001 | 1-5 7-12 14-15 18-24 26-28 30 36-38 40-43 50 54 56 62 64 |
| spleen | University | | 70 72 75 82 84 86 89 91 94-95 98 100 102-105 107 109 |
| | | | 112-113 121 130-131 137-138 140 142-144 146 151-152 |
| | | | 158-159 162 165-166 169 177-178 181 183 189 191 193 |
| | | | 195-198 204-206 210 214 216 220 223-228 230-233 236-237 |
| | | | 240-241 244 |
| fetal liver- | Columbia | FLS002 | 1-4 6 10-12 14-15 17-18 20-22 29-30 33 36 38-40 42 45 56 |
| spleen | University | | 62-64 70 75 80 82 91-92 94-95 98 103-105 109 112-113 |
| | | | 121 126 131 142 144 146 148-149 152 162 165-167 169 |
| | | | 181 183 186 189 191 193 195-199 205-207 214 223 227-228 |
| | | | 233 |
| fetal liver- | Columbia | FLS003 | 94 112 167 181 183 185 223 232 |
| spleen | University | | |
| fetal liver | Invitrogen | FLV001 | 1-3 6-8 15 18 23 36-39 43 62 80 82 143 145 152 177 181 |
| | | | 191 195 206 232 |
| fetal liver | Clontech | FLV004 | 2-3 22 24 36 82 109 122-123 152 162 181 232 |
| fetal muscle | Invitrogen | FMS001 | 5 28 43 47 56 72 78-79 100 137-138 144 152 154 159 169 |
| | | | 193 207 210 237 241 |
| fetal muscle | Invitrogen | FMS002 | 5 137-138 241 |
| fetal skin | Invitrogen | FSK001 | 2-3 8 10 21 35-36 40 43 54 56 62-63 65 69 71 80 84 91 |
| | | | 104-105 124 130 132 137-138 142-143 148-151 158-159 |
| | | | 166 177-178 182 185 197-198 200-201 206 210 217 230 |
| | | | 232 241 |
| fetal skin | Invitrogen | FSK002 | 2-3 8 11-12 21 24 26-27 29 40 43 50 62 82 88 94 98 104 |
| | | | 107 142 148-149 169 185 193 195 216 237 |
| fetal spleen | BioChain | FSP001 | 183 |
| umbilical cord | BioChain | FUC001 | 2-3 5 7-8 15 20 26-27 31-32 34 36 38-40 43 45 50 54 56 62 |
| | | | 76 82 84 94 103-105 107 121-123 130 143-144 146 148-149 |
| | | | 152 154 158-159 178 193 197-198 210 227 232 237 |
| | | | 240 |
| fetal brain | GIBCO | HFB001 | 2-3 8 10-12 15 20-22 24 28-29 31-33 36-38 41 43 54 62 64 |
| | | | 67 70 82 88-89 93 98 101-104 107 109 113 117 130-131 |
| | | | 140 142 144-145 162 167 178 182-183 189 193 195 197-199 |
| | | | 207 210 223 227 229 232 |
| macrophage | Invitrogen | HMP001 | 8 169 |
| infant brain | Columbia | IB2002 | 2-3 9-12 15 20-21 23-24 33-34 38 41-43 49 56 63-64 84 89 |
| | University | | 100 104-105 107 113 118 146 148-150 152 154-155 158 |
| | | | 162 165-166 173 177-178 182 191 193 195 197-201 206 |
| | | | 223 227 230-231 237 241 |
| infant brain | Columbia | IB2003 | 2-3 11-12 17 100 113 150 158 166 178 191 220-221 223 |
| | University | | 227 |
| infant brain | Columbia | IBM002 | 43 117 173 |
| | University | | |
| infant brain | Columbia | IBS001 | 23 29 54 94 109 166 220 |
| | University | | |
| fibroblast | Strategene | LFB001 | 2-3 8 11-12 19 29 36-37 43 45 54 56 104-105 113 130 148-149 |
| | | | 154 159 169 178 182-183 214 236 240 |
| lung tumor | Invitrogen | LGT002 | 2-3 5-6 8 11-12 20-22 24 38 40-41 43 46 52 54 56 62 64-65 |
| | | | 70 72 80 82 87 89 93 100 104 107 130-131 140 142-145 |
| | | | 152 154 159 162 167 177 182-183 195 197-199 206 210 |
| | | | 214 223 236 244 |
| lymphocytes | ATCC | LPC001 | 2-3 11-12 20 22 38 42 50 54 73 80 86 89 94 97 105 127 |
| | | | 145 159 162 177 206 213-214 232 234 |
| leukocyte | GIBCO | LUC001 | 2-4 8 10-12 15 17 19-22 24 26-27 29 35-38 40-43 47 54 56 |
| | | | 62 64 70 72 80 82 84 86 89 91 93-94 101-102 104-105 107 |
| | | | 109 130-131 143-144 146 154 158-159 162 165 167 169 |
| | | | 177-178 182-183 189 191 193 195 200-202 204 206 210 |
| | | | 214 217 223 228-229 231-232 236 240-242 |
| leukocyte | Clontech | LUC003 | 20 42 80 94 105 140 165 191 205 207 214 231 |
| melanoma | Clontech | MEL004 | 42-43 56 64 82 103 107 130 202 206 214 224-225 229 240 |
| from cell line | | | |
| ATCC #CRL | | | |
| 1424 | | | |
| mammary | Invitrogen | MMG001 | 2-4 8-9 11-12 15 17 21 26-27 35-36 38-40 43 46 56 61 64-65 |
| gland | | | 71 80 84 87 89 92 94-95 100-102 107 125 131-132 137-138 |
| | | | 140 143 145 150 152 154 159 162 166 169 173 177 |
| | | | 182-183 191 193 195 197-199 206 210 224-225 227 237 |
| | | | 243-244 |
| induced | Strategene | NTD001 | 2-3 29 34 43 45 54 70 89 159 224-225 |
| neuron cells | | | |
| retinoic acid- | Strategene | NTR001 | 20 124 130 150 152 178 202 217 |
| induced | | | |
| neuronal cells | | | |
| neuronal cells | Strategene | NTU001 | 40 43 47 72 131 217 237 |
| pituitary gland | Clontech | PIT004 | 15 37-38 43 56 130-131 240 |
| placenta | Clontech | PLA003 | 2-3 |
| prostate | Clontech | PRT001 | 5 11-12 43 62 65 83 103 134 152 232 237 |
| rectum | Invitrogen | REC001 | 2-3 15 18 26-27 43 54 56 73 80 130 145 152 183 199 244 |
| salivary gland | Clontech | SAL001 | 14 17 29 43 47 70 98 104 132 159 178 196 204 232-233 |
| | | | 236-237 |
| salivary gland | Clontech | SALs03 | 37 137-138 244 |
| skin fibroblast | ATCC | SFB001 | 43 47 |
| skin fibroblast | ATCC | SFB002 | 54 |
| skin fibroblast | ATCC | SFB003 | 100 |
| small intestine | Clontech | SIN001 | 21 34 46 73-74 86 103 107 130 137-138 144 169 183 193 |
| | | | 227-228 237 242-244 |
| skeletal | Clontech | SKM001 | 5 20 45 79 86 137-138 152 206 |
| muscle | | | |
| skeletal | Clontech | SKM002 | 137-138 |
| muscle | | | |
| skeletal | Clonetech | SKMS03 | 137-138 |
| muscle | | | |
| skeletal | NULL | SKMS04 | 137-138 |
| muscle | | | |
| spinal cord | Clontech | SPC001 | 29 40 43 54 69 75 88-89 91 152 159 162 178 191 195 206 |
| | | | 210 223 229 232 |
| adult spleen | Clontech | SPLc01 | 6 46 50 70 130 140 152 216 240 |
| stomach | Clontech | STO001 | 18 21 63 67 71 107 159 210 220 229 241 244 |
| thalamus | Clontech | THA002 | 9 21 42 45 89 100 117 162 183 220 226-227 242 |
| thymus | Clonetech | THM001 | 2-3 8 11-12 15 21 23-24 29 38-40 43 46 67 80 82 105 131 |
| | | | 151 159 162 191 214 244 |
| thymus | Clontech | THMc02 | 2-4 10-12 22 26-27 31-32 38 43 47 50 54 80 92 94 101-102 |
| | | | 127 134 144 146 152 154-155 158-159 162 167 178 182-183 |
| | | | 191 193 195-196 200-201 205 210 214 216 218 233 |
| | | | 237 240 |
| thyroid gland | Clontech | THR001 | 2-3 5 8 10-12 17-18 20-21 23-24 29 38 42-43 45 49 54 56 |
| | | | 61-62 64 67 70 75-76 78 84 91-92 94 103-105 107 109 122-123 |
| | | | 130 134 143 148-149 155 162 167 169 178 182-183 |
| | | | 186 191 193 195-198 200-201 214 229 232-233 237 240 |
| | | | 244 |
| trachea | Clontech | TRC001 | 2-3 15 19 36-37 40 47 54 65 72 89 95 107 204-205 210 232 |
| | | | 237 244 |
| uterus | Clontech | UTR001 | 8 31-32 54 56 178 183 206 232 236 243 |
| *The 16 tissue-mRNAs and their vendor source, are as follows: 1) Normal adult brain mRNA (Invitrogen), 2) normal adult kidney mRNA (Invitrogen), 3) normal adult liver mRNA (Invitrogen), 4) normal fetal brain mRNA (Invitrogen), 5) normal fetal kidney mRNA (Invitrogen), 6) normal fetal liver mRNA (Invitrogen), 7) normal fetal skin mRNA (Invitrogen), 8) human adrenal gland mRNA (Clontech), 9) human bone marrow mRNA (Clontech), 10) human leukemia | | | |
| #lymphablastic mRNA (Clontech), 11) human thymus mRNA (Clontech). 12) human lymph node mRNA (Clontech), 13) human spinal cord mRNA (Clontech), 14) human thyroid mRNA (Clontech), 15) human esophagus mRNA (BioChain), 16) human conceptional umbilical cord mRNA (BioChain). | | | |

[0446] TABLE 2

| SEQ | | | | | |
|---|---|---|---|---|---|
| ID | Accession | | | | % |
| NO: | Number | Species | Description | Score | Identity |
| 246 | AF145657 | Drosophila | BcDNA.GH10120 | 728 | 38 |
| | | melanogaster | | | |
| 247 | X58141 | Homo | mRNA for erythrocyte adducin alpha subunit. | 3826 | 99 |
| | | sapiens | | | |
| 248 | L29296 | Homo | (clone: SS20B/E6.0) alpha-adducin gene, exons | 3387 | 99 |
| | | sapiens | 14, 15, 16. | | |
| 249 | AAB63963 | Homo | 26-MAR-2001 26-MAY-2000 Human prostate | 1095 | 97 |
| | | sapiens | cancer associated antigen protein sequence SEQ | | |
| | | | ID NO: 1325. | | |
| 250 | M29458 | Homo | carbonic anhydrase III gene, exon 7. | 1441 | 100 |
| | | sapiens | | | |
| 251 | AJ006529 | Gallus gallus | putative phosphatase | 867 | 60 |
| 252 | Y08302 | Homo | mRNA for MAP kinase phosphatase 4. | 1996 | 100 |
| | | sapiens | | | |
| 253 | X53280 | Homo | BTF3a mRNA. | 1048 | 100 |
| | | sapiens | | | |
| 254 | AB013790 | Ateles | immunoglobulin alpha heavy chain | 74 | 43 |
| | | belzebuth | | | |
| 255 | AK027387 | Homo | FLJ14481 fis, clone MAMMA1002351, highly | 964 | 100 |
| | | sapiens | similar to Mus musculus dynactin subunit p25 | | |
| | | | (p25) mRNA. | | |
| 256 | AK001686 | Homo | FLJ10824 fis, clone NT2RP4001086. | 3013 | 93 |
| | | sapiens | | | |
| 257 | AK001686 | Homo | FLJ10824 fis, clone NT2RP4001086. | 4089 | 98 |
| | | sapiens | | | |
| 258 | AK026076 | Homo | FLJ22423 fis, clone HRC08678. | 689 | 100 |
| | | sapiens | | | |
| 259 | AY037207 | Arabidopsis | AT3g22240/MMP21_1 | 66 | 31 |
| | | thaliana | | | |
| 260 | AAW58394 | Homo | 14-SEP-1998 09-OCT-1997 Human | 797 | 92 |
| | | sapiens | spermidine/spermine NI-acetyltransferase. | | |
| 261 | AF220051 | Homo | hematopoietic stem/progenitor cells protein | 844 | 98 |
| | | sapiens | MDS031 mRNA, complete cds. | | |
| 262 | AB017563 | Homo | gene, exon 10 and complete cds. | 2283 | 100 |
| | | sapiens | | | |
| 263 | J03910 | Homo | (clone 14VS) metallothionein-IG (MTIG) gene, | 367 | 98 |
| | | sapiens | complete cds. | | |
| 264 | X56351 | Homo | ALASI (ALASH) mRNA for delta- | 3333 | 100 |
| | | sapiens | aminolevulinate synthase (housekeeping) (EC | | |
| | | | 2.3.1.37). | | |
| 266 | U79241 | Homo | clone 23759 mRNA. partial cds. | 2304 | 100 |
| | | sapiens | | | |
| 267 | AF068291 | Homo | mRNA, partial cds. | 699 | 99 |
| | | sapiens | | | |
| 268 | BC007235 | Homo | clone MGC: 15430, mRNA, complete cds. | 398 | 100 |
| | | sapiens | | | |
| 269 | X69151 | Homo | mRNA for subunit C of vacuolar proton- | 1958 | 100 |
| | | sapiens | ATPase V1 domain. | | |
| 270 | AF271784 | Homo | mRNA, complete cds. | 1017 | 92 |
| | | sapiens | | | |
| 271 | AB025220 | Homo | mRNA for p40phox. complete cds. | 1737 | 100 |
| | | sapiens | | | |
| 272 | AB025220 | Homo | mRNA for p40phox. complete cds. | 1644 | 96 |
| | | sapiens | | | |
| 273 | BC001426 | Homo | Similar to ubiquinol-cytochrome c reductase | 346 | 100 |
| | | sapiens | hinge protein, clone MGC: 1361, mRNA, | | |
| | | | complete cds. | | |
| 274 | AL050051 | Homo | cDNA DKFZp566D193 (from clone | 481 | 98 |
| | | sapiens | DKFZp566D193); partial cds. | | |
| 275 | BC002517 | Homo | Pirin, clone MGC: 2083, mRNA, complete cds. | 1543 | 100 |
| | | sapiens | | | |
| 276 | X69962 | Homo | FMR-1 mRNA. | 2384 | 100 |
| | | sapiens | | | |
| 277 | L29074 | Homo | X mental retardation syndrome protein (FMRI) | 2144 | 92 |
| | | sapiens | gene, alternative splice products, complete cds; | | |
| | | | and pseudogene, complete sequence. | | |
| 278 | AK001711 | Homo | FLJ10849 fis, clone NT2RP4001414, highly | 2179 | 99 |
| | | sapiens | similar to SEPTIN 2 HOMOLOG. | | |
| 279 | AK027641 | Homo | FLJ14735 fis, clone NT2RP3002054. | 651 | 99 |
| | | sapiens | | | |
| 280 | BC009256 | Homo | clone MGC: 14860, mRNA, complete cds. | 1065 | 94 |
| | | sapiens | | | |
| 281 | AL110239 | Homo | cDNA DKFZp566E144 (from clone | 1234 | 99 |
| | | sapiens | DKFZp566E144); complete cds. | | |
| 282 | BC008714 | Homo | prostatic binding protein, clone MGC: 8531, | 1017 | 100 |
| | | sapiens | mRNA, complete cds. | | |
| 283 | BC004374 | Homo | ARPI (actin-related protein 1, yeast) homolog B | 1949 | 100 |
| | | sapiens | (centractin beta), clone MGC: 10568, mRNA, | | |
| | | | complete cds. | | |
| 284 | AF201334 | Homo | mRNA, complete cds. | 2395 | 100 |
| | | sapiens | | | |
| 285 | BC008743 | Homo | zyxin, clone MGC: 3071, mRNA, complete cds. | 3145 | 100 |
| | | sapiens | | | |
| 286 | BC005957 | Homo | solute carrier family 25 (mitochondrial carrier; | 1557 | 100 |
| | | sapiens | peroxisomal membrane protein, 34 kD), member | | |
| | | | 17, clone MGC: 14604, mRNA, complete cds. | | |
| 287 | AF273053 | Homo | tumor antigen se89-1 mRNA, complete cds. | 3570 | 82 |
| | | sapiens | | | |
| 288 | AB028893 | Homo | U32, U33, U34, U35, RPS11, U35 genes for | 595 | 100 |
| | | sapiens | ribosomal protein L13a and S11, U32, U33, | | |
| | | | U34, U35, and U35 snoRNA, complete cds and | | |
| | | | sequence. | | |
| 289 | AC003973 | Homo | from chromosome 19, BAC 33152, complete | 5273 | 81 |
| | | sapiens | sequence. | | |
| 290 | AF253978 | Homo | mRNA, partial cds. | 487 | 85 |
| | | sapiens | | | |
| 291 | AF018265 | synthetic | immunoglobulin lambda light chain | 278 | 79 |
| | | construct | | | |
| 292 | BC005134 | Homo | Similar to ribosomal protein L14, clone | 1102 | 99 |
| | | sapiens | MGC: 11208, mRNA, complete cds. | | |
| 293 | AK000869 | Homo | FLJ10007 fis, clone HEMBA 1000193. | 2635 | 100 |
| | | sapiens | | | |
| 294 | AAB73229 | Homo | 11-MAY-2001 11-AUG-2000 Human | 2127 | 98 |
| | | sapiens | phosphatase MTMR7_h. | | |
| 295 | BC003618 | Homo | Similar to putative nuclear protein, clone | 3042 | 100 |
| | | sapiens | MGC: 1819, mRNA, complete cds. | | |
| 296 | AAB54346 | Homo | 09-MAR-2001 08-MAR-2000 Human | 4092 | 99 |
| | | sapiens | pancreatic cancer antigen protein sequence SEQ | | |
| | | | ID NO: 798. | | |
| 297 | AK000330 | Homo | FLJ20323 fis. clone HEP09648. | 2229 | 100 |
| | | sapiens | | | |
| 298 | AF176701 | Homo | protein FBL9 mRNA. partial cds. | 1072 | 100 |
| | | sapiens | | | |
| 299 | X54977 | Bos taurus | 17,000 dalton myosin light chain | 789 | 100 |
| 300 | AL096746 | Homo | cDNA DKFZp586E1322 (from clone | 1186 | 100 |
| | | sapiens | DKFZp586E1322): partial cds. | | |
| 301 | BC000502 | Homo | ribosomal protein L17, clone MGC: 8457, | 970 | 100 |
| | | sapiens | mRNA, complete cds. | | |
| 302 | AC004079 | Homo | clone RP1-167F23 from 7p15, complete | 1965 | 100 |
| | | sapiens | sequence. | | |
| 303 | X92485 | Plasmodium | pval | 149 | 55 |
| | | vivax | | | |
| 304 | AK006347 | Mus | putative | 429 | 86 |
| | | musculus | | | |
| 305 | AL137544 | Homo | cDNA DKFZp434A 1520 (from clone | 974 | 98 |
| | | sapiens | DKFZp434A 1520); partial cds. | | |
| 306 | AC006276 | Homo | 19, cosmid R28379, complete sequence. | 900 | 99 |
| | | sapiens | | | |
| 307 | AK024297 | Homo | FLJ14235 fis, clone NT2RP4000167. | 2325 | 100 |
| | | sapiens | | | |
| 308 | AK005941 | Mus | putative | 460 | 88 |
| | | musculus | | | |
| 309 | AF265440 | Homo | mRNA, complete cds. | 1413 | 100 |
| | | sapiens | | | |
| 311 | AB027251 | Homo | for zinc finger protein (ZFD25), complete cds. | 4369 | 100 |
| | | sapiens | | | |
| 312 | AK008240 | Mus | putative | 455 | 100 |
| | | musculus | | | |
| 313 | AAB75337 | Homo | 03-APR-2001 01-JUN-2000 Human secreted | 138 | 60 |
| | | sapiens | protein sequence encoded by gene 47 SEQ ID | | |
| | | | NO: 156. | | |
| 314 | AF321191 | Homo | (PRX) mRNA, complete cds, alternatively | 7312 | 99 |
| | | sapiens | spliced. | | |
| 315 | AF225417 | Homo | kDa protein mRNA, complete cds. | 3701 | 99 |
| | | sapiens | | | |
| 316 | AK000265 | Homo | FLJ20258 fis, clone COLF7250. | 2797 | 97 |
| | | sapiens | | | |
| 317 | D90070 | Homo | ATL-derived PMA-responsive (APR) peptide | 278 | 100 |
| | | sapiens | mRNA. | | |
| 318 | U79725 | Homo | A33 antigen precursor mRNA, complete cds. | 1678 | 100 |
| | | sapiens | | | |
| 319 | M83679 | Rattus | RAB15 | 1077 | 97 |
| | | norvegicus | | | |
| 320 | AK024715 | Homo | FLJ21062 fis, clone CAS01044. | 927 | 98 |
| | | sapiens | | | |
| 321 | AK000075 | Homo | FLJ20068 fis, clone COL01755. | 1729 | 99 |
| | | sapiens | | | |
| 322 | AC007954 | Homo | 14 clone RP11-493G17 and CTD-2516D11 map | 4243 | 100 |
| | | sapiens | 14q24.3, complete sequence. | | |
| 323 | Z33905 | Homo | gene for 43 kD acetylcholine receptor-associated | 2150 | 99 |
| | | sapiens | protein (Rapsyn). | | |
| 324 | AF030027 | Equine | 71 | 118 | 22 |
| | | herpesvirus 4 | | | |
| 325 | AJ291606 | Xenopus | gamma tubulin ring protein | 2024 | 55 |
| | | laevis | | | |
| 326 | AAB64610 | Homo | 22-MAR-2001 01-JUN-2000 Human secreted | 197 | 72 |
| | | sapiens | protein BLAST search protein SEQ ID NO: | | |
| | | | 120. | | |
| 327 | AAB53677 | Homo | 09-MAR-2001 08-MAR-2000 Human colon | 694 | 99 |
| | | sapiens | cancer antigen protein sequence SEQ ID | | |
| | | | NO: 1217. | | |
| 328 | AF159055 | Homo | zipper-like protein (LZLP) mRNA, complete | 116 | 79 |
| | | sapiens | cds. | | |
| 329 | AL160111 | Homo | 1 of a novel human mRNA from chromosome | 2126 | 100 |
| | | sapiens | 22. | | |
| 330 | AF159055 | Homo | zipper-like protein (LZLP) mRNA, complete | 130 | 80 |
| | | sapiens | cds. | | |
| 331 | AK026264 | Homo | FLJ22611 fis, clone HS104961. | 685 | 96 |
| | | sapiens | | | |
| 332 | X57809 | Homo | rearranged immunoglobulin lambda light chain | 1223 | 100 |
| | | sapiens | mRNA. | | |
| 333 | AAB87440 | Homo | 22-MAY-2001 31-AUG-2000 Human gene 32 | 513 | 75 |
| | | sapiens | encoded secreted protein fragment, SEQ ID | | |
| | | | NO: 181. | | |
| 334 | AK012475 | Mus | putative | 2259 | 84 |
| | | musculus | | | |
| 335 | AF090930 | Homo | HQ0478 PRO0478 mRNA, complete cds. | 146 | 72 |
| | | sapiens | | | |
| 336 | AL080196 | Homo | cDNA DKFZp434C212 (from clone | 2292 | 94 |
| | | sapiens | DKFZp434C212). | | |
| 337 | AK019766 | Mus | putative | 1288 | 71 |
| | | musculus | | | |
| 338 | X69398 | Homo | mRNA for OA3 antigenic surface determinant. | 1632 | 100 |
| | | sapiens | | | |
| 339 | AK019305 | Mus | putative | 506 | 96 |
| | | musculus | | | |
| 340 | AL078630 | Mus | 573K1.15 (mm17M1-6 (novel 7 transmembrane | 1023 | 81 |
| | | musculus | receptor (rhodopsin family) (olfactory receptor | | |
| | | | LIKE) protein)) | | |
| 341 | AF118078 | Homo | PRO1848 | 574 | 100 |
| | | sapiens | | | |
| 342 | AK005566 | Mus | putative | 1218 | 94 |
| | | musculus | | | |
| 343 | U71363 | Homo | zinc finger protein zfp6 (ZF6) mRNA, partial | 1367 | 70 |
| | | sapiens | cds. | | |
| 344 | AK015315 | Mus | putative | 556 | 76 |
| | | musculus | | | |
| 345 | AF218451 | Homo | substrate p130Cas mRNA, complete cds. | 4579 | 99 |
| | | sapiens | | | |
| 346 | AF151046 | Homo | HSPC212 | 1345 | 87 |
| | | sapiens | | | |
| 347 | AF151046 | Homo | HSPC212 | 817 | 74 |
| | | sapiens | | | |
| 348 | Z14244 | Homo | coxVIIb mRNA for cytochrome c oxidase | 426 | 100 |
| | | sapiens | subunit VIIb. | | |
| 349 | BC001037 | Homo | ribosomal protein L35a, clone MGC: 1639, | 581 | 100 |
| | | sapiens | mRNA, complete cds. | | |
| 351 | AAB45018 | Homo | 12-FEB-2001 09-MAR-2000 Human secreted | 142 | 57 |
| | | sapiens | protein encoded by gene 41 homologue. | | |
| 352 | AAY94885 | Homo | 12-JUN-2000 22-JUL-1999 Human protein | 540 | 99 |
| | | sapiens | clone HP10550. | | |
| 353 | AF161557 | Homo | HSPC072 | 472 | 100 |
| | | sapiens | | | |
| 354 | AAG01438 | Homo | 06-OCT-2000 21-FEB-2000 Human secreted | 353 | 92 |
| | | sapiens | protein, SEQ ID NO: 5519. | | |
| 355 | AF161507 | Homo | HSPC158 | 1197 | 99 |
| | | sapiens | | | |
| 356 | AL122111 | Homo | cDNA DKFZp434A1721 (from clone | 2868 | 99 |
| | | sapiens | DKFZp434A1721). | | |
| 357 | AF349540 | Homo | XIII secreted phospholipase A2 mRNA. | 1073 | 100 |
| | | sapiens | complete cds. | | |
| 358 | AF274714 | Homo | protein-related protein (ORPI) mRNA. | 2363 | 100 |
| | | sapiens | complete cds. | | |
| 359 | AAG03793 | Homo | 06-OCT-2000 21-FEB-2000 Human secreted | 222 | 67 |
| | | sapiens | protein, SEQ ID NO: 7874. | | |
| 360 | BC000705 | Homo | clone MGC: 861, mRNA, complete cds. | 908 | 100 |
| | | sapiens | | | |
| 361 | AAG03789 | Homo | 06-OCT-2000 21-FEB-2000 Human secreted | 188 | 60 |
| | | sapiens | protein, SEQ ID NO: 7870. | | |
| 362 | AAB62810 | Homo | 02-MAY-2001 06-JUL-2000 Human nervous | 501 | 96 |
| | | sapiens | system associated protein NSPRT3 amino acid | | |
| | | | sequence. | | |
| 363 | AF161370 | Homo | mRNA, partial cds. | 654 | 91 |
| | | sapiens | | | |
| 364 | AK011592 | Mus | putative | 1245 | 66 |
| | | musculus | | | |
| 365 | AK002154 | Homo | FLJ11292 fis, clone PLACE1009665. | 230 | 64 |
| | | sapiens | | | |
| 366 | AF159297 | Zea mays | extensin-like protein | 349 | 28 |
| 367 | AF125096 | Homo | HSPC042 protein | 137 | 96 |
| | | sapiens | | | |
| 368 | AF125096 | Homo | HSPC042 protein | 243 | 98 |
| | | sapiens | | | |
| 369 | AK001745 | Homo | FLJ10883 fis, clone NT2RP4001946, weakly | 1880 | 99 |
| | | sapiens | similar to PROTEIN-L-ISOASPARTATE O- | | |
| | | | METHYLTRANSFERASE (EC 2.1.1.77). | | |
| 370 | AF151783 | Homo | (MEG3) mRNA, complete cds. | 3651 | 99 |
| | | sapiens | | | |
| 371 | X16707 | Homo | fra-1 mRNA. | 1443 | 100 |
| | | sapiens | | | |
| 372 | AF176555 | Homo | anchoring protein 220 mRNA, complete cds. | 9783 | 99 |
| | | sapiens | | | |
| 373 | X78121 | Homo | mRNA. | 3404 | 100 |
| | | sapiens | | | |
| 374 | U82670 | Homo | Xq28 psHMG17 pseudogene, complete | 2513 | 99 |
| | | sapiens | sequence; and melanoma antigen family A1 | | |
| | | | (MAGEA1) and zinc finger protein 275 | | |
| | | | (ZNF275) genes, complete cds. | | |
| 375 | AK018726 | Mus | putative | 670 | 100 |
| | | musculus | | | |
| 376 | BC000187 | Homo | cytochrome c oxidase subunit VIc, clone | 379 | 100 |
| | | sapiens | MGC: 1520, mRNA, complete cds. | | |
| 377 | AAY87548 | Homo | 18-JUL-2000 03-NOV-1997 Human disease- | 729 | 100 |
| | | sapiens | associated calmodulin protein (DACP-1). | | |
| 378 | AK003198 | Mus | putative | 562 | 100 |
| | | musculus | | | |
| 379 | AK000496 | Homo | FLJ20489 fis, clone KAT08285. | 333 | 69 |
| | | sapiens | | | |
| 380 | AF130079 | Homo | PRO2852 | 308 | 74 |
| | | sapiens | | | |
| 381 | AAY91961 | Homo | 19-JUL-2000 17-SEP-1999 Human | 1293 | 96 |
| | | sapiens | cytoskeleton associated protein 16 (CYSKP-16). | | |
| 382 | M15202 | Rattus | troponin T class IIIa beta | 1155 | 94 |
| | | norvegicus | | | |
| 383 | AF026276 | Homo | skeletal troponin T (TNNT3) gene, complete | 1205 | 94 |
| | | sapiens | cds. | | |
| 384 | AF090694 | Homo | RNA binding protein (NAPOR-2) mRNA, | 2519 | 98 |
| | | sapiens | complete cds. | | |
| 385 | BC007655 | Homo | protein phosphatase 1, regulatory (inhibitor) | 1051 | 100 |
| | | sapiens | subunit 2, clone MGC: 1327, mRNA, complete | | |
| | | | cds. | | |
| 386 | AF161533 | Homo | HSPC048 | 573 | 100 |
| | | sapiens | | | |
| 387 | BC002801 | Homo | p47, clone MGC: 3347, mRNA, complete cds. | 1812 | 96 |
| | | sapiens | | | |
| 388 | AK027878 | Homo | FLJ14972 fis, cloneTHYRO1000715. | 2669 | 98 |
| | | sapiens | | | |
| 389 | AF161418 | Homo | HSPC300 | 378 | 100 |
| | | sapiens | | | |
| 390 | AK010720 | Mus | putative | 105 | 28 |
| | | musculus | | | |
| 391 | X66358 | Homo | mRNA KKIALRE for serine/threonine protein | 1929 | 99 |
| | | sapiens | kinase. | | |
| 392 | AF290612 | Homo | Q0310 liver nuclear protein mRNA, complete | 2246 | 98 |
| | | sapiens | cds. | | |
| 393 | U69263 | Homo | precursor, mRNA, complete cds. | 4516 | 99 |
| | | sapiens | | | |
| 394 | U69263 | Homo | precursor, mRNA, complete cds. | 4021 | 99 |
| | | sapiens | | | |
| 395 | AK000838 | Homo | FLJ20831 fis, clone ADKA03080. | 761 | 100 |
| | | sapiens | | | |
| 396 | AK006393 | Mus | putative | 819 | 90 |
| | | musculus | | | |
| 397 | AF312033 | Mus | ASR2A | 4584 | 97 |
| | | musculus | | | |
| 398 | BC001904 | Homo | Similar to phosphoglycerate mutase 2 (muscle), | 270 | 100 |
| | | sapiens | clone MGC: 2269, mRNA, complete cds. | | |
| 399 | Y14391 | Homo | for putative GTP-binding protein. | 2042 | 99 |
| | | sapiens | | | |
| 400 | AF242528 | Homo | finger protein 291 (ZNF291) mRNA, complete | 294 | 100 |
| | | sapiens | cds. | | |
| 401 | AF116695 | Homo | PRO2221 | 173 | 46 |
| | | sapiens | | | |
| 402 | AAR32020 | Homo | 11-JUL-1993 14-AUG-1992 Sequence of a | 734 | 66 |
| | | sapiens | eukaryotic transcription factor (TF). | | |
| 403 | AB049127 | Homo | mRNA for MAP/microtubule affinity-regulating | 2227 | 73 |
| | | sapiens | kinase like 1. complete cds. | | |
| 404 | K03250 | Rattus | ribosomal protein S11 | 824 | 100 |
| | | norvegicus | | | |
| 405 | AF144233 | Homo | binding peptide mRNA, partial cds. | 328 | 96 |
| | | sapiens | | | |
| 406 | AC007055 | Homo | 14 clone BAC 201F1 map 14q24.3, complete | 519 | 100 |
| | | sapiens | sequence. | | |
| 407 | AK001752 | Homo | FLJ10890 fis, clone NT2RP4002071. | 5019 | 99 |
| | | sapiens | | | |
| 408 | AF090931 | Homo | HQ0483$ PRO0483 mRNA, complete cds. | 133 | 58 |
| | | sapiens | | | |
| 409 | A28080 | Mycobacterium | 34 kDa protein | 75 | 36 |
| | | avium | | | |
| | | subsp. | | | |
| | | paratuberculosis | | | |
| 410 | AL136704 | Homo | cDNA DKFZp566A1524 (from clone | 1662 | 99 |
| | | sapiens | DKFZp566A1524); complete cds. | | |
| 411 | AL137347 | Homo | cDNA DKFZp761M1511 (from clone | 473 | 100 |
| | | sapiens | DKFZp761M1511); partial cds. | | |
| 412 | AK027527 | Homo | FLJ14621 fis, clone NT2RP2000079. | 1012 | 100 |
| | | sapiens | | | |
| 413 | AAG01083 | Homo | 06-OCT-2000 21-FEB-2000 Human secreted | 274 | 96 |
| | | sapiens | protein. SEQ ID NO: 5164. | | |
| 414 | BC009405 | Homo | adenylate kinase 2, clone MGC: 15301, mRNA, | 1094 | 100 |
| | | sapiens | complete cds. | | |
| 415 | U34994 | Homo | dependent protein kinase catalytic subunit | 21178 | 100 |
| | | sapiens | (PRKDC) mRNA, complete cds; alternatively | | |
| | | | spliced. | | |
| 416 | U47077 | Homo | protein kinase catalytic subunit (DNA-PKcs) | 21319 | 99 |
| | | sapiens | mRNA, complete cds. | | |
| 417 | U22229 | Felis catus | ribosomal protein L41 | 128 | 100 |
| 418 | AF361481 | Homo | GTP-binding protein 1 (GTPBP3) gene, | 1402 | 94 |
| | | sapiens | complete cds; nuclear gene for mitochondrial | | |
| | | | product. | | |
| 419 | BC000606 | Homo | Similar to ribosomal protein L14, clone | 1094 | 100 |
| | | sapiens | MGC: 1644, mRNA, complete cds. | | |
| 421 | AAY73345 | Homo | 24-FEB-2000 04-MAY-1999 HTRM clone | 2171 | 73 |
| | | sapiens | 438283 protein sequence. | | |
| 422 | AK000632 | Homo | FLJ20625 fis, clone KAT04008. | 816 | 100 |
| | | sapiens | | | |
| 423 | AC004668 | Homo | clone CTA-276O3 from 7q22-q31.1, complete | 1976 | 99 |
| | | sapiens | sequence. | | |
| 424 | AK000496 | Homo | FLJ20489 fis, clone KAT08285. | 238 | 73 |
| | | sapiens | | | |
| 425 | AAY02785 | Homo | 11-JUN-1999 07-JUL-1998 Human secreted | 82 | 43 |
| | | sapiens | protein encoded by gene 51 clone HUKEX85. | | |
| 426 | AF118092 | Homo | PRO2061 | 1440 | 96 |
| | | sapiens | | | |
| 427 | AK000382 | Homo | FLJ20375 fis, clone HUV00942. | 1330 | 99 |
| | | sapiens | | | |
| 428 | Y15286 | Homo | for vacuolar proton-ATPase subunit M9.2. | 459 | 100 |
| | | sapiens | | | |
| 429 | AK014098 | Mus | putative | 524 | 68 |
| | | musculus | | | |
| 430 | AF286095 | Homo | receptor (IL22R) mRNA, complete cds. | 629 | 86 |
| | | sapiens | | | |
| 431 | AK023266 | Homo | FLJ13204 fis, clone NT2RP3004507, weakly | 758 | 90 |
| | | sapiens | similar to MOB1 PROTEIN. | | |
| 432 | AF047354 | Homo | and spleen DNase precursor (LSD) mRNA, | 1046 | 99 |
| | | sapiens | complete cds. | | |
| 433 | X53682 | Homo | LAG-1 gene. | 484 | 100 |
| | | sapiens | | | |
| 434 | AC000064 | Homo | BAC clone RG083M05 from 7q21-7q22, | 298 | 100 |
| | | sapiens | complete sequence. | | |
| 435 | AL390921 | Arabidopsis | putative protein | 72 | 44 |
| | | thaliana | | | |
| 436 | AAB87440 | Homo | 22-MAY-2001 31-AUG-2000 Human gene 32 | 1572 | 100 |
| | | sapiens | encoded secreted protein fragment, SEQ ID | | |
| | | | NO: 181. | | |
| 437 | AP003001 | Mesorhizobium | O-linked GlcNAc transferase | 153 | 30 |
| | | loti | | | |
| 438 | AK000642 | Homo | FLJ20635 fis, clone KAT03466. | 1854 | 99 |
| | | sapiens | | | |
| 439 | Z48810 | Homo | mRNA for TX protease precursor. | 306 | 92 |
| | | sapiens | | | |
| 441 | AC003002 | Homo | DNA from overlapping chromosome 19- | 436 | 98 |
| | | sapiens | specific cosmids R29515 and R28253, genomic | | |
| | | | sequence, complete sequence. | | |
| 442 | AF109377 | Mus | ldlBp | 3979 | 82 |
| | | musculus | | | |
| 443 | AF109377 | Mus | ldlBp | 2711 | 81 |
| | | musculus | | | |
| 444 | AAG02042 | Homo | 06-OCT-2000 21-FEB-2000 Human secreted | 797 | 100 |
| | | sapiens | protein, SEQ ID NO: 6123. | | |
| 445 | M17877 | Plasmodium | interspersed repeat antigen | 291 | 27 |
| | | falciparum | | | |
| 446 | M17877 | Plasmodium | interspersed repeat antigen | 291 | 27 |
| | | falciparum | | | |
| 447 | AB025784 | Rattus | PPAR gamma coactivator | 331 | 46 |
| | | norvegicus | | | |
| 448 | AK000755 | Homo | FLJ20748 fis, clone HEP05772. | 831 | 96 |
| | | sapiens | | | |
| 449 | AK001714 | Homo | FLJ10852 fis, clone NT2RP4001498, weakly | 2586 | 100 |
| | | sapiens | similar to ANKYRIN REPEAT-CONTAINING | | |
| | | | PROTEIN AKR1. | | |
| 450 | AB042646 | Homo | mRNA, complete cds. | 1224 | 100 |
| | | sapiens | | | |
| 451 | AF125533 | Homo | b5 reductase isoform mRNA, complete cds. | 1606 | 100 |
| | | sapiens | | | |
| 452 | AAY02591 | Homo | 19-JUL-1999 09-OCT-1998 A human | 849 | 100 |
| | | sapiens | progesterone receptor complex p23-like protein. | | |
| 453 | BC000600 | Homo | Similar to from HeLa cyclin-dependent kinase 2 | 1106 | 100 |
| | | sapiens | interacting protein, clone MGC: 849, mRNA, | | |
| | | | complete cds. | | |
| 454 | Z46937 | Caenorhabdit | similarity with ribosomal protein L21 | 140 | 38 |
| | | is elegans | | | |
| 455 | AF161556 | Homo | HSPC071 | 941 | 100 |
| | | sapiens | | | |
| 456 | AF225971 | Homo | (TUBG2) mRNA, complete cds. | 2346 | 99 |
| | | sapiens | | | |
| 458 | AF343664 | Homo | receptor translocation associated protein 2c | 736 | 55 |
| | | sapiens | (IRTA2) mRNA, complete cds, alternatively | | |
| | | | spliced. | | |
| 459 | AF191545 | Homo | mRNA, complete cds. | 4141 | 99 |
| | | sapiens | | | |
| 460 | AF118082 | Homo | PRO1902 | 202 | 58 |
| | | sapiens | | | |
| 461 | D00531 | Oncorhynchus | apopolysialoglycoprotein | 512 | 30 |
| | | masou | | | |
| 462 | Z11898 | Homo | OTF3 mRNA encoding octamer binding protein | 1948 | 100 |
| | | sapiens | 3A. | | |
| 464 | AL162044 | Homo | cDNA DKFZp761L0812 (from clone | 220 | 41 |
| | | sapiens | DKFZp761L0812); partial cds. | | |
| 465 | AL137301 | Homo | cDNA DKFZp434N1429 (from clone | 543 | 100 |
| | | sapiens | DKFZp434N1429); partial cds. | | |
| 466 | AB032593 | Homo | for PXR2b, complete cds. | 3201 | 100 |
| | | sapiens | | | |
| 467 | AL050075 | Homo | cDNA DKFZp566F0546 (from clone | 407 | 100 |
| | | sapiens | DKFZp566F0546); partial cds. | | |
| 468 | AK000732 | Homo | FLJ20725 fis, clone HEP13903. | 1653 | 99 |
| | | sapiens | | | |
| 469 | AB049638 | Homo | mRNA for mitochondrial ribosomal protein L11 | 941 | 100 |
| | | sapiens | (L11mt), complete cds. | | |
| 470 | AB049638 | Homo | mRNA for mitochondrial ribosomal protein L11 | 737 | 99 |
| | | sapiens | (L11mt), complete cds. | | |
| 471 | AB014772 | Homo | for MOP-3, complete cds. | 1722 | 99 |
| | | sapiens | | | |
| 472 | AAY59808 | Homo | 18-JAN-2000 03-APR-1998 Human normal | 778 | 100 |
| | | sapiens | ovarian tissue derived protein 85. | | |
| 473 | AF331500 | multiple | recombinant envelope protein | 1177 | 92 |
| | | sclerosis | | | |
| | | associated | | | |
| | | retrovirus | | | |
| | | element | | | |
| 474 | AF257330 | Homo | protein mRNA, complete cds. | 962 | 96 |
| | | sapiens | | | |
| 475 | AK000632 | Homo | FLJ20625 fis, clone KAT04008. | 809 | 99 |
| | | sapiens | | | |
| 476 | M58511 | Homo | iron-responsive element-binding protein/iron | 4968 | 99 |
| | | sapiens | regulatory protein 2 (IRE-BP2/IRP2) mRNA, | | |
| | | | partial cds. | | |
| 477 | AF181989 | Homo | beta subunit variant (HBB) mRNA, complete | 588 | 90 |
| | | sapiens | cds. | | |
| 478 | AC003002 | Homo | DNA from overlapping chromosome 19- | 752 | 100 |
| | | sapiens | specific cosmids R29515 and R28253, genomic | | |
| | | | sequence, complete sequence. | | |
| 479 | BC002924 | Homo | clone IMAGE: 3956179, mRNA, partial cds. | 1221 | 99 |
| | | sapiens | | | |
| 480 | AF109146 | Homo | lectin superfamily 6 (CLECSF6) mRNA, | 958 | 99 |
| | | sapiens | complete cds. | | |
| 481 | BC005374 | Homo | Similar to RIKEN cDNA 1110001E24 gene, | 995 | 100 |
| | | sapiens | clone MGC: 12490, mRNA, complete cds. | | |
| 482 | X75285 | Mus | fibulin-2 | 5621 | 81 |
| | | musculus | | | |
| 483 | AC007954 | Homo | 14 clone RP11-493G17 and CTD-2516D11 map | 1342 | 100 |
| | | sapiens | 14q24.3, complete sequence. | | |
| 484 | AK016295 | Mus | putative | 116 | 27 |
| | | musculus | | | |
| 485 | AB028893 | Homo | U32, U33, U34, U35, RPS11, U35 genes for | 434 | 100 |
| | | sapiens | ribosomal protein L13a and S11, U32, U33, | | |
| | | | U34, U35, and U35 snoRNA, complete cds and | | |
| | | | sequence. | | |
| 486 | BC003681 | Homo | clone IMAGE: 3453235, mRNA, partial cds. | 2829 | 96 |
| | | sapiens | | | |
| 487 | AK009235 | Mus | putative | 1648 | 92 |
| | | musculus | | | |
| 488 | AF294900 | Homo | beta-carotene 15,15′- dioxygenase (BCDO) | 2912 | 100 |
| | | sapiens | mRNA, complete cds. | | |
| 489 | AAB43979 | Homo | 08-FEB-2001 08-MAR-2000 Human cancer | 1051 | 86 |
| | | sapiens | associated protein sequence SEQ ID NO: 1424. | | |
| 490 | AF220025 | Homo | motif protein TRIM5 isoform alpha (TRIM5) | 1299 | 95 |
| | | sapiens | mRNA, complete cds; alternatively spliced. | | |

[0447] TABLE 3

| SEQ ID | Accession | | |
|---|---|---|---|
| NO: | Number | Description | Results* |
| 247 | PF00596 | Class II Aldolases and Adducin N- | PF00596C 17.24 9.710e−20 217-243 |
| | | terminal domain proteins. | PF00596B 15.07 4.938e−14 |
| | | | 180-202 PF00596D 13.89 |
| | | | 4.079e−12 297-315 |
| 248 | PF00596 | Class II Aldolases and Adducin N- | PF00596C 17.24 9.710e−20 217-243 |
| | | terminal domain proteins. | PF00596B 15.07 4.938e−14 |
| | | | 180-202 PF00596D 13.89 |
| | | | 4.079e−12 297-315 |
| 250 | BL00162 | Eukaryotic-type carbonic anhydrases | BL00162C 17.78 1.000e−40 88-125 |
| | | proteins. | BL00162E 14.93 6.478e−34 |
| | | | 189-222 BL00162F 22.68 |
| | | | 6.727e−30 226-260 BL00162A |
| | | | 22.92 5.179e−26 16-47 |
| | | | BL00162D 15.06 4.960e−22 126-151 |
| | | | BL00162B 21.43 5.345e−17 |
| | | | 51-74 |
| 252 | BL00383 | Tyrosine specific protein phosphatases | BL00383E 10.35 1.196e−11 288-299 |
| | | proteins. | |
| 253 | PD02749 | TRANSCRIPTION PROTEIN | PD02749B 12.75 1.000e−40 84-120 |
| | | FACTOR BTF3 REGULATION | PD02749C 13.96 3.739e−34 |
| | | NUCL. | 136-170 PD02749A 9.56 6.000e−15 |
| | | | 51-64 |
| 256 | BL00824 | Elongation factor 1 beta/beta'/delta | BL00824B 9.21 8.419e−09 281-301 |
| | | chain proteins. | |
| 257 | BL00824 | Elongation factor 1 beta/beta'/delta | BL00824B 9.21 8.419e−09 281-301 |
| | | chain proteins. | |
| 260 | PF00583 | Acetyltransferase (GNAT) family. | PF00583A 12.53 3.571e−12 175-186 |
| 262 | PD01364 | MUCIN GLYCOPROTEIN | PD01364B 13.94 1.000e−10 336-352 |
| | | PRECURSOR MEM. | |
| 263 | PR00860 | VERTEBRATE | PR00860B 7.04 2.929e−20 28-42 |
| | | METALLOTHIONEIN SIGNATURE | PR00860C 9.61 1.474e−14 42-52 |
| | | | PR00860A 5.46 9.229e−12 6-19 |
| 264 | BL00599 | Aminotransferases class-II pyridoxal- | BL00599B 18.93 8.800e−27 278-307 |
| | | phosphate attachment sit. | BL00599D 13.25 8.773e−13 |
| | | | 411-424 BL00599C 9.13 5.235e−11 |
| | | | 334-344 |
| 266 | PD01769 | REDUCTASE PAPS | PD01769C 21.60 8.393e−18 416-452 |
| | | BIOSYNTHESIS PHOSPHOADENO. | |
| 271 | PR00497 | NEUTROPHIL CYTOSOL FACTOR | PR00497D 11.91 1.176e−28 192-214 |
| | | P40 SIGNATURE | PR00497E 10.43 1.123e−26 |
| | | | 241-261 PR00497A 6.92 1.136e−24 |
| | | | 56-74 PR00497B 4.99 1.125e−23 |
| | | | 74-93 PR00497C 8.89 1.100e−21 |
| | | | 131-147 PR00497F 8.66 |
| | | | 1.138e−15 297-309 |
| 272 | BL50002 | Src homology 3 (SH3) domain | BL50002A 14.19 6.538e−11 177-196 |
| | | proteins profile. | |
| 276 | PF00013 | KH domain proteins family of RNA | PF00013 5.78 2.059e−10 268-280 |
| | | binding proteins. | |
| 277 | PF00013 | KH domain proteins family of RNA | PF00013 5.78 2.059e−10 268-280 |
| | | binding proteins. | |
| 280 | PF00930 | Dipeptidyl peptidase IV (DPP IV) N- | PF00930J 8.78 4.231e−09 394-415 |
| | | terminal region. | |
| 282 | BL01220 | Phosphatidylethanolamine-binding | BL01220B 16.65 1.000e−40 105-146 |
| | | protein family proteins. | BL01220C 14.75 5.846e−34 |
| | | | 146-174 BL01220A 22.62 |
| | | | 3.400e−31 67-98 BL01220D |
| | | | 18.75 5.364e−31 189-221 |
| 283 | BL00406 | Actins proteins. | BL00406B 5.47 1.000e−40 88-143 |
| | | | BL00406C 6.75 1.000e−40 147-202 |
| | | | BL00406D 12.58 7.000e−40 |
| | | | 270-325 BL00406E 8.44 6.087e−39 |
| | | | 327-377 BL00406A 9.95 |
| | | | 6.087e−29 11-46 |
| 284 | BL00227 | Tubulin subunits alpha, beta, and | BL00227C 25.48 7.792e−26 119-171 |
| | | gamma proteins. | BL00227D 18.46 2.286e−20 |
| | | | 253-307 BL00227B 19.29 |
| | | | 4.720e−13 58-113 BL00227A |
| | | | 24.55 4.649e−12 1-35 |
| 285 | BL00478 | LIM domain proteins. | BL00478B 14.79 3.739e−14 463-478 |
| | | | BL00478B 14.79 3.500e−12 |
| | | | 405-420 BL00478B 14.79 |
| | | | 6.000e−12 530-545 |
| 286 | PR00927 | ADENINE NUCLEOTIDE | PR00927B 14.66 6.236e−14 146-168 |
| | | TRANSLOCATOR 1 SIGNATURE | |
| 288 | BL00783 | Ribosomal protein L13 proteins. | BL00783C 22.43 8.071e−20 87-117 |
| | | | BL00783A 14.55 1.600e−19 |
| | | | 8-33 BL00783B 12.76 3.500e−12 |
| | | | 74-86 |
| 289 | PD01066 | PROTEIN ZINC FINGER ZINC- | PD01066 19.43 2.500e−38 422-461 |
| | | FINGER METAL-BINDING NU. | |
| 291 | DM00031 | IMMUNOGLOBULIN V REGION. | DM00031A 16.80 8.364e−11 20-68 |
| 292 | PD02808 | PROTEIN RIBOSOMAL L14 | PD02808A 12.03 3.739e−38 5-42 |
| | | PROBABLE 60. | PD02808B 19.19 8.500e−36 85-120 |
| 294 | BL00383 | Tyrosine specific protein phosphatases | BL00383E 10.35 2.756e−12 263-274 |
| | | proteins. | |
| 295 | BL01160 | Kinesin light chain repeat proteins. | BL01160B 19.54 8.093e−09 510-564 |
| 297 | PR00706 | PYROGLUTAMYL PEPTIDASE I | PR00706B 10.56 6.870e−09 74-87 |
| | | (C15) FAMILY SIGNATURE | |
| 300 | PR00453 | VON WILLEBRAND FACTOR | PR00453A 12.79 4.750e−15 40-58 |
| | | TYPE A DOMAIN SIGNATURE | |
| 301 | BL00464 | Ribosomal protein L22 proteins. | BL00464B 28.48 4.960e−35 106-151 |
| | | | BL00464A 29.41 9.700e−23 |
| | | | 17-54 |
| 302 | BL00027 | ‘Homeobox’ domain proteins. | BL00027 26.43 6.727e−36 158-201 |
| 307 | BL01113 | C1q domain proteins. | BL01113A 17.99 2.558e−09 712-739 |
| 310 | BL00226 | Intermediate filaments proteins. | BL00226D 19.10 9.571e−40 371-418 |
| | | | BL00226B 23.86 4.600e−38 |
| | | | 205-253 BL00226C 13.23 |
| | | | 9.500e−26 270-301 BL00226A |
| | | | 12.77 4.000e−16 104-119 |
| 311 | PD01066 | PROTEIN ZINC FINGER ZINC- | PD01066 19.43 5.135e−34 6-45 |
| | | FINGER METAL-BINDING NU. | |
| 312 | PD01861 | PROTEIN NUCLEAR | PD01861A 14.06 4.393e−11 26-50 |
| | | RIBONUCLEOPROTEIN SMALL | |
| | | MRNA RNA. | |
| 315 | BL00192 | Cytochrome b/b6 heme-ligand | BL00192A 11.90 3.700e−09 96-136 |
| | | proteins. | |
| 316 | PR00049 | WILM'S TUMOR PROTEIN | PR00049D 0.00 6.445e−11 661-676 |
| | | SIGNATURE | |
| 318 | DM00031 | IMMUNOGLOBULIN V REGION. | DM00031B 15.41 4.423e−11 103-137 |
| 319 | BL01115 | GTP-binding nuclear protein ran | BL01115A 10.22 7.455e−13 9-53 |
| | | proteins. | |
| 321 | BL00378 | Hexokinases proteins. | BL00378A 19.01 8.375e−09 279-307 |
| 323 | BL00405 | 43 Kd postsynaptic protein. | BL00405C 10.15 1.000e−40 65-115 |
| | | | BL00405D 6.60 1.000e−40 |
| | | | 123-166 BL00405G 7.78 1.000e−40 |
| | | | 226-263 BL00405H 16.83 |
| | | | 1.000e−40 263-302 BL004051 |
| | | | 13.75 1.000e−40 302-339 |
| | | | BL00405J 13.28 1.000e−40 339-373 |
| | | | BL00405K 7.57 1.000e−40 |
| | | | 373-413 BL00405B 15.33 |
| | | | 6.538e−39 26-58 BL00405F 8.07 |
| | | | 1.900e−38 195-226 BL00405E |
| | | | 8.84 1.529e−34 166-192 |
| | | | BL00405A 9.73 1.643e−31 2-26 |
| 327 | BL00048 | Protamine P1 proteins. | BL00048 6.39 8.475e−15 24-51 |
| | | | BL00048 6.39 2.918e−14 26-53 |
| | | | BL00048 6.39 5.279e−14 34-61 |
| | | | BL00048 6.39 5.721e−14 32-59 |
| | | | BL00048 6.39 7.197e−14 11-38 |
| | | | BL00048 6.39 8.082e−14 22-49 |
| | | | BL00048 6.39 2.246e−13 10-37 |
| | | | BL00048 6.39 6.677e−13 33-60 |
| | | | BL00048 6.39 7.092e−13 7-34 |
| | | | BL00048 6.39 7.785e−13 8-35 |
| | | | BL00048 6.39 7.923e−13 23-50 |
| | | | BL00048 6.39 1.926e−12 9-36 |
| | | | BL00048 6.39 1.926e−12 31-58 |
| | | | BL00048 6.39 2.456e−12 20-47 |
| | | | BL00048 6.39 6.294e−12 14-41 |
| | | | BL00048 6.39 7.221e−12 25-52 |
| | | | BL00048 6.39 7.750e−12 12-39 |
| | | | BL00048 6.39 9.868e−12 21-48 |
| | | | BL00048 6.39 1.125e−11 19-46 |
| | | | BL00048 6.39 2.375e−11 13-40 |
| | | | BL00048 6.39 6.875e−11 6-33 |
| | | | BL00048 6.39 8.125e−11 36-63 |
| | | | BL00048 6.39 8.250e−11 18-45 |
| | | | BL00048 6.39 8.250e−11 30-57 |
| | | | BL00048 6.39 1.947e−10 5-32 |
| | | | BL00048 6.39 3.605e−10 4-31 |
| | | | BL00048 6.39 4.908e−10 27-54 |
| | | | BL00048 6.39 5.974e−10 42-69 |
| | | | BL00048 6.39 7.039e−10 15-42 |
| | | | BL00048 6.39 7.750e−10 17-44 |
| | | | BL00048 6.39 7.987e−10 39-66 |
| | | | BL00048 6.39 9.526e−10 1-28 |
| | | | BL00048 6.39 1.225e−09 38-65 |
| | | | BL00048 6.39 3.363e−09 16-43 |
| | | | BL00048 6.39 4.038e−09 3-30 |
| | | | BL00048 6.39 5.950e−09 28-55 |
| | | | BL00048 6.39 6.288e−09 29-56 |
| | | | BL00048 6.39 6.400e−09 40-67 |
| | | | BL00048 6.39 6.738e−09 2-29 |
| | | | BL00048 6.39 7.863e−09 35-62 |
| 331 | PR00221 | CAULIMOVIRUS COAT PROTEIN | PR00221H 12.82 1.217e−09 27-41 |
| | | SIGNATURE | |
| 332 | BL00290 | Immunoglobulins and major | BL00290A 20.89 1.529e−14 187-210 |
| | | histocompatibility complex proteins. | BL00290B 13.17 9.000e−12 |
| | | | 247-265 |
| 334 | BL00415 | Synapsins proteins. | BL00415N 4.29 8.420e−10 334-378 |
| 336 | PR00779 | INOSITOL 1,4,5-TRISPHOSPHATE- | PR00779F 14.51 5.147e−09 512-535 |
| | | BINDING PROTEIN RECEPTOR | |
| | | SIGNATURE | |
| 338 | DM00179 | w KINASE ALPHA ADHESION T- | DM00179 13.97 7.158e−10 107-117 |
| | | CELL. | |
| 339 | BL00224 | Clathrin light chain proteins. | BL00224B 16.94 8.200e−09 167-220 |
| 340 | PR00237 | RHODOPSIN-LIKE GPCR | PR00237B 13.50 1.000e−11 1-23 |
| | | SUPERFAMILY SIGNATURE | |
| 343 | PD00066 | PROTEIN ZINC-FINGER METAL- | PD00066 13.92 5.154e−15 321-334 |
| | | BINDI. | PD00066 13.92 2.800e−14 |
| | | | 237-250 PD00066 13.92 8.800e−14 |
| | | | 265-278 PD00066 13.92 |
| | | | 3.000e−13 293-306 PD00066 |
| | | | 13.92 9.217e−11 209-222 |
| 345 | PR00452 | SH3 DOMAIN SIGNATURE | PR00452B 11.65 4.600e−15 20-36 |
| 347 | BL00563 | Stathmin family proteins. | BL00563D 11.38 4.835e−09 279-315 |
| 349 | BL01105 | Ribosomal protein L35Ae proteins. | BL01105A 17.37 1.000e−40 16-61 |
| | | | BL01105B 12.95 1.000e−40 80-120 |
| 350 | PD02411 | PROTEIN TRANSCRIPTION | PD02411 21.89 2.929e−15 2227-2261 |
| | | REGULATION NUCLEAR. | |
| 355 | BL00464 | Ribosomal protein L22 proteins. | BL00464B 28.48 4.908e−10 128-173 |
| | | | BL00464A 29.41 7.045e−09 |
| | | | 69-106 |
| 358 | BL01013 | Oxysterol-binding protein family | BL01013D 26.81 8.000e−26 358-402 |
| | | proteins. | BL01013A 25.14 7.231e−21 |
| | | | 45-81 BL01013C 9.97 1.000e−13 |
| | | | 132-142 BL01013B 11.33 |
| | | | 1.000e−11 110-121 |
| 366 | PD02557 | UREASE ACCESSORY PROTEIN | PD02557C 10.85 6.262e−09 29-44 |
| | | UREF NICKEL. | |
| 369 | BL01279 | Protein-L-isoaspartate(D-aspartate) O- | BL01279A 24.27 7.614e−12 67-115 |
| | | methyltransferase signa. | |
| 371 | PR00042 | FOS TRANSFORMING PROTEIN | PR00042E 9.69 8.200e−25 154-178 |
| | | SIGNATURE | PR00042D 8.97 9.735e−24 |
| | | | 133-155 PR00042C 8.29 4.549e−21 |
| | | | 115-132 PR00042B 10.70 |
| | | | 2.983e−20 98-115 PR00042A |
| | | | 10.04 6.400e−20 39-57 |
| 373 | PR00893 | RAB ESCORT | PR00893H 7.37 2.588e−34 411-439 |
| | | (CHOROIDERAEMIA) PROTEIN | PR00893J 1.42 1.500e−28 |
| | | SIGNATURE | 565-586 PR00893D 13.14 |
| | | | 1.563e−28 114-138 PR00893C |
| | | | 15.10 2.500e−27 94-115 |
| | | | PR00893K 7.01 1.000e−26 600-620 |
| | | | PR00893I 14.97 2.667e−26 |
| | | | 543-563 PR00893A 10.55 |
| | | | 1.134e−25 45-64 PR00893F |
| | | | 10.78 3.314e−25 294-313 |
| | | | PR00893E 13.94 1.231e−22 213-230 |
| | | | PR00893G 12.88 5.500e−22 |
| | | | 351-368 PR00893B 8.07 6.192e−22 |
| | | | 75-93 |
| 374 | BL00028 | Zinc finger. C2H2 type. domain | BL00028 16.07 9.471e−14 508-525 |
| | | proteins. | BL00028 16.07 9.100e−13 |
| | | | 424-441 BL00028 16.07 2.957e−12 |
| | | | 536-553 BL00028 16.07 |
| | | | 4.115e−11 340-357 BL00028 |
| | | | 16.07 8.269e−11 452-469 |
| | | | BL00028 16.07 4.300e−10 312-329 |
| | | | BL00028 16.07 7.600e−10 |
| | | | 480-497 |
| 375 | PF01020 | Ribosomal L40e family. | PF01020 15.00 1.000e−40 80-129 |
| 377 | PR00450 | RECOVERIN FAMILY SIGNATURE | PR00450C 12.22 7.840e−10 86-108 |
| | | | PR00450C 12.22 7.380e−09 |
| | | | 52-74 PR00450C 12.22 7.835e−09 |
| | | | 16-38 |
| 381 | PF00992 | Troponin. | PF00992B 26.31 4.000e−30 178-213 |
| | | | PF00992A 16.67 2.636e−29 |
| | | | 100-135 PF00992C 16.35 |
| | | | 2.800e−15 244-262 |
| 382 | PF00992 | Troponin. | PF00992B 26.31 4.000e−30 157-192 |
| | | | PF00992A 16.67 2.636e−29 |
| | | | 79-114 PF00992C 16.35 2.800e−15 |
| | | | 223-241 |
| 383 | PF00992 | Troponin. | PF00992B 26.31 4.000e−30 162-197 |
| | | | PF00992A 16.67 2.636e−29 |
| | | | 84-119 PF00992C 16.35 2.800e−15 |
| | | | 228-246 |
| 384 | PD02784 | PROTEIN NUCLEAR | PD02784B 26.46 8.307e−10 455-498 |
| | | RIBONUCLEOPROTEIN. | |
| 385 | PF01140 | Matrix protein (MA), p15. | PF01140D 15.54 9.686e−09 112-147 |
| 388 | DM00892 | 3 RETROVIRAL PROTEINASE. | DM00892C 23.55 3.323e−14 340-374 |
| 391 | PR00109 | TYROSINE KINASE CATALYTIC | PR00109B 12.27 6.553e−13 117-136 |
| | | DOMAIN SIGNATURE | |
| 393 | PR00453 | VON WILLEBRAND FACTOR | PR00453A 12.79 9.571e−16 528-546 |
| | | TYPE A DOMAIN SIGNATURE | PR00453B 14.65 5.000e−13 |
| | | | 567-582 |
| 394 | PR00453 | VON WILLEBRAND FACTOR | PR00453A 12.79 9.571e−16 528-546 |
| | | TYPE A DOMAIN SIGNATURE | PR00453B 14.65 5.000e−13 |
| | | | 567-582 |
| 399 | PR00326 | GTPI/OBG GTP-BINDING | PR00326A 8.75 1.514e−09 184-205 |
| | | PROTEIN FAMILY SIGNATURE | |
| 402 | PD00066 | PROTEIN ZINC-FINGER METAL- | PD00066 13.92 1.692e−10 235-248 |
| | | BINDI. | |
| 403 | BL00239 | Receptor tyrosine kinase class II | BL00239B 25.15 1.529e−16 106-154 |
| | | proteins. | |
| 404 | BL00056 | Ribosomal protein S17 proteins. | BL00056A 28.90 3.769e−32 75-115 |
| | | | BL00056B 20.86 6.727e−23 |
| | | | 123-147 |
| 406 | BL00150 | Acylphosphatase proteins. | BL00150 25.33 1.000e−40 9-56 |
| 410 | PR00245 | OLFACTORY RECEPTOR | PR00245D 10.47 5.224e−09 186-198 |
| | | SIGNATURE | |
| 413 | BL00019 | Actinin-type actin-binding domain | BL00019A 12.56 1.000e−13 38-49 |
| | | proteins. | |
| 414 | BL00113 | Adenylate kinase proteins. | BL00113B 20.49 5.667e−32 784-828 |
| | | | BL00113D 24.41 2.565e−27 |
| | | | 889-920 BL00113C 12.82 |
| | | | 2.286e−16 832-847 |
| 415 | BL00915 | Phosphatidylinositol 3-and 4-kinases | BL00915B 22.78 9.022e−19 3750-3788 |
| | | proteins. | BL00915C 22.43 6.250e−18 |
| | | | 3873-3912 |
| 416 | BL00915 | Phosphatidylinositol 3-and 4-kinases | BL00915B 22.78 9.022e−19 3750-3788 |
| | | proteins. | BL00915C 22.43 6.250e−18 |
| | | | 3904-3943 |
| 418 | PR00326 | GIPI/OBG GTP-BINDING | PR00326A 8.75 2.364e−10 186-207 |
| | | PROTEIN FAMILY SIGNATURE | |
| 419 | PD02808 | PROTEIN RIBOSOMAL L14 | PD02808A 12.03 3.739e−38 5-42 |
| | | PROBABLE 60. | PD02808B 19.19 8.500e−36 85-120 |
| 421 | PD01066 | PROTEIN ZINC FINGER ZINC- | PD01066 19.43 4.767e−31 26-65 |
| | | FINGER METAL-BINDING NU. | |
| 423 | BL00143 | Insulinase family, zinc-binding region | BL00143B 14.41 4.115e−13 102-117 |
| | | proteins. | |
| 426 | BL00514 | Fibrinogen beta and gamma chains C- | BL00514C 17.41 1.000e−40 206-243 |
| | | terminal domain proteins. | BL00514D 15.35 7.000e−16 |
| | | | 251-264 BL00514B 16.42 |
| | | | 4.000e−15 150-166 BL00514A |
| | | | 11.68 6.885e−12 40-50 |
| 427 | PR00536 | MELANOCYTE STIMULATING | PR00536G 6.26 2.688e−09 333-342 |
| | | HORMONE RECEPTOR | |
| | | SIGNATURE | |
| 432 | PR00130 | DNASE I SIGNATURE | PR00130E 14.66 5.871e−16 146-176 |
| | | | PR00130D 8.65 2.862e−15 |
| | | | 116-146 PR00130H 14.38 |
| | | | 1.106e−11 229-250 PR00130F |
| | | | 11.23 1.086e−10 176-206 |
| | | | PR00130G 7.22 2.340e−10 206-229 |
| | | | PR00130A 11.39 7.000e−10 |
| | | | 31-61 |
| 433 | PR00437 | SMALL CXC CYTOKINE FAMILY | PR00437C 14.85 4.696e−09 68-87 |
| | | SIGNATURE | |
| 445 | PF00624 | Flocculin repeat proteins. | PF00624J 6.21 9.782e−10 429-484 |
| 446 | PF00624 | Flocculin repeat proteins. | PF00624J 6.21 9.782e−10 429-484 |
| 447 | PF01140 | Matrix protein (MA), p15. | PF01140D 15.54 2.256e−09 222-257 |
| 449 | PF00791 | Domain present in ZO-1 and Unc5-like | PF00791B 28.49 8.515e−10 120-175 |
| | | netrin receptors. | |
| 450 | BL00027 | ‘Homeobox’ domain proteins. | BL00027 26.43 1.818e−21 36-79 |
| 451 | BL00191 | Cytochrome b5 family, heme-binding | BL00191K 17.38 4.951e−27 184-228 |
| | | domain proteins. | BL00191J 11.37 6.447e−17 |
| | | | 128-150 |
| 454 | BL00028 | Zinc finger, C2H2 type, domain | BL00028 16.07 8.457e−09 22-39 |
| | | proteins. | |
| 456 | BL00227 | Tubulin subunits alpha, beta, and | BL00227B 19.29 1.000e−40 51-106 |
| | | gamma proteins. | 106 BL00227C 25.48 1.000e−40 |
| | | | 113-165 BL00227D 18.46 |
| | | | 1.000e−40 223-277 BL00227A |
| | | | 24.55 2.607e−31 2-36 BL00227F |
| | | | 21.16 4.316e−30 382-436 |
| | | | BL00227E 24.15 2.667e−23 331-366 |
| 457 | PR00301 | 70 KD HEAT SHOCK PROTEIN | PR00301C 8.62 8.875e−11 235-244 |
| | | SIGNATURE | |
| 458 | DM00179 | w KINASE ALPHA ADHESION T- | DM00179 13.97 6.870e−09 47-57 |
| | | CELL. | DM00179 13.97 8.435e−09 238-248 |
| 459 | PR00756 | MEMBRANE ALANYL | PR00756D 10.58 1.529e−21 367-383 |
| | | DIPEPTIDASE (MI) FAMILY | PR00756B 14.06 5.737e−16 |
| | | SIGNATURE | 253-269 PR00756A 12.90 |
| | | | 1.237e−13 205-221 PR00756E |
| | | | 11.91 4.094e−13 386-399 |
| | | | PR00756C 11.60 6.108e−11 331-342 |
| 461 | PR00648 | GPR3 ORPHAN RECEPTOR | PR00648B 7.41 8.340e−09 1029-1048 |
| | | SIGNATURE | |
| 462 | BL00027 | ‘Homeobox’ domain proteins. | BL00027 26.43 5.500e−27 245-288 |
| 466 | PD00126 | PROTEIN REPEAT DOMAIN TPR | PD00126A 22.53 2.862e−09 515-536 |
| | | NUCLEA. | |
| 469 | BL00359 | Ribosomal protein L11 proteins. | BL00359A 20.66 5.395e−23 20-56 |
| | | | BL00359B 23.07 4.176e−19 66-107 |
| | | | BL00359C 22.18 2.000e−12 |
| | | | 123-157 |
| 470 | BL00359 | Ribosomal protein L11 proteins. | BL00359B 23.07 4.176e−19 40-81 |
| | | | BL00359C 22.18 2.000e−12 97-131 |
| 473 | PF00429 | ENV polyprotein (coat polyprotein). | PF00429 31.08 3.195e−12 299-349 |
| 476 | BL00450 | Aconitase family proteins. | BL00450B 42.34 8.393e−30 281-336 |
| | | | BL00450D 21.14 2.800e−18 |
| | | | 560-584 BL00450B 42.34 |
| | | | 6.400e−12 341-396 BL00450A |
| | | | 13.76 2.406e−11 246-260 |
| | | | BL00450C 11.95 6.657e−10 507-517 |
| 477 | BL01033 | Globins profile. | BL01033A 16.94 7.923e−18 25-47 |
| | | | BL01033B 13.81 1.000e−15 93-105 |
| 480 | BL00615 | C-type lectin domain proteins. | BL00615A 16.68 5.500e−10 78-96 |
| | | | BL00615B 12.25 7.577e−09 178-192 |
| 482 | BL01177 | Anaphylatoxin domain proteins. | BL01177E 20.64 5.800e−24 1043-1070 |
| | | | BL01177C 17.39 5.333e−19 |
| | | | 997-1016 BL01177B 13.61 |
| | | | 7.840e−16 703-719 BL01177D |
| | | | 17.50 1.900e−15 1022-1040 |
| 487 | BL01032 | Protein phosphatase 2C proteins. | BL01032H 11.25 8.200e−09 253-266 |
| 489 | BL00290 | Immunoglobulins and major | BL00290A 20.89 1.563e−15 154-177 |
| | | histocompatibility complex proteins. | BL00290B 13.17 9.000e−12 |
| | | | 214-232 |
| 490 | PR00245 | OLFACTORY RECEPTOR | PR00245A 18.03 5.886e−10 461-483 |
| | | SIGNATURE | |

*Results include in order: accession number subtype; raw score; p-value; position of signature in amino acid sequence

[0448] TABLE 4

| SEQ ID | | | | Pfam |
|---|---|---|---|---|
| NO: | Pfam Model | Description | E-value | Score |
| 247 | Aldolase_II | Class II Aldolase and Adducin N-terminal | 7.3e−105 | 361.8 |
| 248 | Aldolase_II | Class II Aldolase and Adducin N-terminal | 7.3e−105 | 361.8 |
| 249 | rrm | RNA recognition motif. | 8.8e−06 | 32.6 |
| 250 | carb_anhydrase | Eukaryotic-type carbonic anhydrase | 7.8e−178 | 604.2 |
| 252 | DSPc | Dual specificity phosphatase, catalytic doma | 3.6e−69 | 243.2 |
| 253 | NAC | NAC domain | 4.7e−30 | 113.3 |
| 255 | hexapep | Bacterial transferase hexapeptide | 6.2e−06 | 33.1 |
| 260 | Acetyltransf | Acetyltransferase (GNAT) family | 2.8e−19 | 77.5 |
| 262 | ig | Immunoglobulin domain | 5.2e−20 | 69.5 |
| 263 | metalthio | Metallothionein | 1.3e−22 | 88.6 |
| 264 | aminotran_2 | Aminotransferases class-II | 2.4e−109 | 376.7 |
| 265 | IPP_isomerase | Isopentenyl-diphosphate delta-isomerase | 1.6e−128 | 440.4 |
| 266 | PAPS_reduct | Phosphoadenosine phosphosulfate reductase | 6.2e−14 | 59.7 |
| 271 | PX | PX domain | 7.4e−31 | 115.9 |
| 272 | PX | PX domain | 7.4e−31 | 115.9 |
| 276 | KH-domain | KH domain | 7.2e−13 | 56.2 |
| 277 | KH-domain | KH domain | 7.2e−13 | 56.2 |
| 278 | GTP_CDC | Cell division protein | 7.6e−119 | 408.2 |
| 280 | abhydrolase_2 | Phospholipase/Carboxylesterase | 0.013 | −41.9 |
| 282 | PBP | Phosphatidylethanolamine-binding protein | 7.8e−88 | 305.2 |
| 283 | actin | Actin | 1e−174 | 574.6 |
| 284 | tubulin | Tubulin/FtsZ family | 5e−99 | 342.4 |
| 285 | LIM | LIM domain containing proteins | 4.6e−36 | 132.3 |
| 286 | mito_carr | Mitochondrial carrier proteins | 1.4e−41 | 145.5 |
| 288 | Ribosomal_L13 | Ribosomal protein L13 | 4.1e−56 | 199.8 |
| 289 | zf-C2H2 | Zinc finger, C2H2 type | 5.4e−268 | 903.7 |
| 291 | ig | Immunoglobulin domain | 0.053 | 11.5 |
| 292 | Ribosomal_L14e | Ribosomal protein L14 | 3.4e−34 | 127.0 |
| 295 | PH | PH domain | 3.1e−20 | 77.3 |
| 296 | Lysyl_hydro | Lysyl hydrolase | 0 | 2058.2 |
| 299 | efhand | EF hand | 0.075 | 19.5 |
| 300 | vwa | von Willebrand factor type A domain | 2.8e−35 | 130.6 |
| 301 | Ribosomal_L22 | Ribosomal protein L22p/L17e | 4e−67 | 236.4 |
| 302 | homeobox | Homeobox domain | 4e−34 | 126.8 |
| 309 | IF3 | Translation initiation factor IF-3 | 0.00048 | 15.1 |
| 310 | filament | Intermediate filament proteins | 9.2e−178 | 604.0 |
| 311 | zf-C2H2 | Zinc finger, C2H2 type | 5.6e−143 | 488.4 |
| 312 | Sm | Sm protein | 5.6e−26 | 99.7 |
| 314 | PDZ | PDZ domain (Also known as DHR or GLGF) | 0.037 | 15.2 |
| 316 | SH3 | SH3 domain | 3.6e−12 | 53.9 |
| 318 | ig | Immunoglobulin domain | 1.5e−12 | 45.5 |
| 319 | ras | Ras family | 5.1e−94 | 325.8 |
| 321 | SAM | SAM domain (Sterile alpha motif) | 9.9e−10 | 45.8 |
| 323 | TPR | TPR Domain | 1.1e−12 | 55.5 |
| 329 | rrm | RNA recognition motif. | 4.7e−09 | 43.5 |
| 332 | ig | Immunoglobulin domain | 1e−20 | 71.8 |
| 336 | VPS9 | Vacuolar sorting protein 9 (VPS9) domain | 1.1e−30 | 115.4 |
| 338 | ig | Immunoglobulin domain | 0.0079 | 14.2 |
| 340 | 7tm_1 | 7 transmembrane receptor (rhodopsin family) | 2.7e−20 | 66.6 |
| 342 | Hydrolase | haloacid dehalogenase-like hydrolase | 7.9e−28 | 105.9 |
| 343 | zf-C2H2 | Zinc finger. C2H2 type | 5.1e−35 | 129.8 |
| 345 | SH3 | SH3 domain | 2.2e−14 | 61.2 |
| 349 | Ribosomal_L35Ae | Ribosomal protein L35Ae | 6e−77 | 269.0 |
| 350 | SET | SET domain | 1.1e−56 | 201.7 |
| 358 | Oxysterol_BP | Oxysterol-binding protein | 3.4e−95 | 329.7 |
| 369 | PCMT | Protein-L-isoaspartate(D-aspartate) O-methyl | 5e−10 | 1.8 |
| 370 | PH | PH domain | 9.6e−05 | 22.0 |
| 371 | bZIP | bZIP transcription factor | 3.2e−07 | 30.8 |
| 373 | GDI | GDP dissociation inhibitor | 7.4e−25 | 64.8 |
| 374 | zf-C2H2 | Zinc finger, C2H2 type | 7.1e−78 | 272.1 |
| 375 | ubiquitin | Ubiquitin family | 3.7e−61 | 193.6 |
| 377 | efhand | EF hand | 1.5e−37 | 138.2 |
| 381 | Troponin | Troponin | 4.7e−42 | 153.1 |
| 382 | Troponin | Troponin | 4.7e−42 | 153.1 |
| 383 | Troponin | Troponin | 4.7e−42 | 153.1 |
| 384 | rrm | RNA recognition motif. | 7.5e−51 | 182.4 |
| 387 | UBX | UBX domain | 1.5e−25 | 98.3 |
| 388 | G-patch | G-patch domain | 4.4e−10 | 46.9 |
| 391 | pkinase | Eukaryotic protein kinase domain | 1.2e−110 | 381.1 |
| 393 | EGF | EGF-like domain | 3.6e−82 | 286.4 |
| 394 | EGF | EGF-like domain | 3.6e−82 | 286.4 |
| 398 | PGAM | Phosphoglycerate mutase family | 6.1e−07 | 29.2 |
| 402 | zf-C2H2 | Zinc finger, C2H2 type | 4e−24 | 93.6 |
| 403 | pkinase | Eukaryotic protein kinase domain | 1.1e−101 | 351.3 |
| 404 | Ribosomal_S17 | Ribosomal protein S17 | 6e−43 | 148.6 |
| 406 | Acylphosphatase | Acylphosphatase | 8.5e−64 | 225.4 |
| 407 | TPR | TPR Domain | 1.2e−14 | 62.1 |
| 414 | adenylatekinase | Adenylate kinase | 1.9e−119 | 410.3 |
| 415 | FAT | FAT domain | 9.3e−192 | 650.4 |
| 416 | FAT | FAT domain | 9.3e−192 | 650.4 |
| 418 | MMR_HSR1 | GTPase of unknown function | 0.00015 | −32.8 |
| 419 | Ribosomal_L14e | Ribosomal protein L14 | 3.4e−34 | 127.0 |
| 421 | zf-C2H2 | Zinc finger, C2H2 type | 5.2e−99 | 342.3 |
| 423 | Peptidase_M16 | Insulinase (Peptidase family M16) | 4.3e−42 | 153.3 |
| 426 | fibrinogen_C | Fibrinogen beta and gamma chains, C-term | 2.4e−68 | 238.3 |
| 432 | DNase_I | Deoxyribonuclease I (DNase I) | 1.2e−171 | 583.6 |
| 433 | IL8 | Small cytokines (intecrine/chemokine), inter | 2.3e−33 | 115.6 |
| 437 | TPR | TPR Domain | 4.4e−08 | 40.3 |
| 440 | PDZ | PDZ domain (Also known as DHR or GLGF) | 0.038 | 15.1 |
| 445 | zf-C2H2 | Zinc finger, C2H2 type | 2.7e−22 | 87.5 |
| 446 | zf-C2H2 | Zinc finger, C2H2 type | 4.1e−23 | 90.2 |
| 447 | rrm | RNA recognition motif. | 0.0029 | 24.3 |
| 449 | ank | Ank repeat | 4.1e−31 | 116.8 |
| 451 | Cyt_reductase | FAD/NAD-binding Cytochrome reductase | 7.7e−61 | 215.5 |
| 455 | Ribosomal_L18p | Ribosomal L18p/L5e family | 0.084 | −34.1 |
| 456 | tubulin | Tubulin/FtsZ family | 3.4e−283 | 954.2 |
| 457 | laminin_G | Laminin G domain | 1.1e−51 | 185.1 |
| 458 | ig | Immunoglobulin domain | 2.7e−23 | 80.1 |
| 459 | Peptidase_M1 | Peptidase family M1 | 6.4e−184 | 533.4 |
| 462 | pou | Pou domain - N-terminal to homeobox | 1.3e−48 | 175.0 |
| | | domain | | |
| 466 | TPR | TPR Domain | 2.4e−30 | 114.2 |
| 469 | Ribosomal_L11 | Ribosomal protein L11 | 7.3e−53 | 189.0 |
| 470 | Ribosomal_L11 | Ribosomal protein L11 | 7e−40 | 145.9 |
| 473 | ENV_polyprotein | ENV polyprotein (coat polyprotein) | 1.5e−37 | 129.4 |
| 476 | aconitase | Aconitase family (aconitate hydratase) | 2e−189 | 621.7 |
| 477 | globin | Globin | 5.5e−44 | 157.8 |
| 480 | lectin_c | Lectin C-type domain | 1.5e−21 | 85.0 |
| 482 | EGF | EGF-like domain | 1e−22 | 88.9 |
| 487 | PP2C | Protein phosphatase 2C | 1.1e−13 | 51.7 |
| 489 | ig | Immunoglobulin domain | 1.8e−20 | 71.0 |
| 490 | 7tm_1 | 7 transmembrane receptor (rhodopsin family) | 3.1e−13 | 44.2 |

[0449] TABLE 5

| SEQ ID | PDB | Chain | | | | | | | | |
|---|---|---|---|---|---|---|---|---|---|---|
| NO: | ID | ID | Start AA | End AA | PSI BLAST | Verify Score | PMF Score | SeqFold Score | Compound | PDB Annotation |
| 252 | 1mkp | | 201 | 344 | 3e−40 | | | 205.21 | PYST1; CHAIN: NULL; | HYDROLASE DUAL SPECIFICITY |
| | | | | | | | | | | PHOSPHATASE, MAP KINASE |
| | | | | | | | | | | HYDROLASE |
| 262 | 1b2w | L | 43 | 241 | 8.5e−66 | | | 67.25 | ANTIBODY (LIGHT CHAIN); | IMMUNE SYSTEM |
| | | | | | | | | | CHAIN: L; ANTIBODY (HEAVY | IMMUNOGLOBULIN; |
| | | | | | | | | | CHAIN); CHAIN: H; | IMMUNOGLOBULIN ANTIBODY |
| | | | | | | | | | | ENGINEERING, HUMANIZED AND |
| | | | | | | | | | | CHIMERIC ANTIBODY, FAB, 2 X-RAY |
| | | | | | | | | | | STRUCTURE, THREE-DIMENSIONAL |
| | | | | | | | | | | STRYCTURE, GAMMA-3 |
| | | | | | | | | | | INTERFERON, IMMUNE SYSTEM |
| 262 | 1b6d | A | 43 | 238 | 3.4e−65 | | | 68.72 | IMMUNOGLOBULIN; CHAIN: A, B; | IMMUNOGLOBULIN |
| | | | | | | | | | | IMMUNOGLOBULIN, KAPPA LIGHT- |
| | | | | | | | | | | CHAIN DIMER HEADER |
| 262 | 1bjl | L | 43 | 240 | 6.8e−67 | | | 71.40 | FAB FRAGMENT; CHAIN: L, H, J, | COMPLEX (ANTIBODY/ANTIGEN) |
| | | | | | | | | | K; VASCULAR ENDOTHELIAL | FAB-12; VEGF; COMPLEX |
| | | | | | | | | | GROWTH FACTOR; CHAIN: V, W; | (ANTIBODY/ANTIGEN), ANGIOGENIC |
| | | | | | | | | | | FACTOR |
| 262 | 1bog | A | 43 | 241 | 6.8e−61 | | | 67.70 | ANTIBODY (CB 4-1); CHAIN: A, B; | COMPLEX (ANTIBODY/PEPTIDE) |
| | | | | | | | | | PEPTIDE; CHAIN: C; | POLYSPECIFICITY, CROSS |
| | | | | | | | | | | REACTIVITY, FAB-FRAGMENT, |
| | | | | | | | | | | PEPTIDE, 2 HIV-1, COMPLEX |
| | | | | | | | | | | (ANTIBODY/PEPTIDE) |
| 262 | 1bz7 | A | 43 | 232 | 8.5e−60 | | | 69.74 | ANTIBODY R24 (LIGHT CHAIN); | IMMUNE SYSTEM ANTIBODY (FAB |
| | | | | | | | | | CHAIN: A; ANTIBODY R24 | FRAGMENT), IMMUNE SYSTEM |
| | | | | | | | | | (HEAVY CHAIN); CHAIN: B; | |
| 262 | 1cel | L | 43 | 238 | 5.1e−65 | | | 68.83 | CAMPATH-1H: LIGHT CHAIN; | ANTIBODY THERAPEUTIC, |
| | | | | | | | | | CHAIN: L; CAMPATH-1H: HEAVY | ANTIBODY, CD52 |
| | | | | | | | | | CHAIN; CHAIN: H; PEPTIDE | |
| | | | | | | | | | ANTIGEN; CHAIN: P; | |
| 262 | 1dfb | L | 43 | 241 | 8.5e−66 | | | 69.59 | IMMUNOGLOBULIN 3D6 FAB | |
| | | | | | | | | | 1DFB 3 | |
| 262 | 1fvd | A | 43 | 241 | 6.8e−66 | | | 72.66 | IMMUNOGLOBULIN FAB | |
| | | | | | | | | | FRAGMENT OF HUMANIZED | |
| | | | | | | | | | ANTIBODY 4D5, VERSION 4 1FVD 3 | |
| 262 | 1gcl | L | 43 | 238 | 1.2e−62 | | | 71.86 | ENVELOPE PROTEIN GP120; | COMPLEX (HIV ENVELOPE |
| | | | | | | | | | CHAIN: G; CD4; CHAIN: C; | PROTEIN/CD4/FAB) COMPLEX (HIV |
| | | | | | | | | | ANTIBODY 17B; CHAIN: L, H; | ENVELOPE PROTEIN/CD4/FAB), HIV-1 |
| | | | | | | | | | | EXTERIOR 2 ENVELOPE GPI20. T- |
| | | | | | | | | | | CELL SURFACE GLYCOPROTEIN |
| | | | | | | | | | | CD4. 3 ANTIGEN-BINDING |
| | | | | | | | | | | FRAGMENT OF HUMAN |
| | | | | | | | | | | IMMUNOGLOBULIN 17B, 4 |
| | | | | | | | | | | GLYCOSYLATED PROTEIN |
| 262 | 1itb | B | 149 | 429 | 12e−22 | | | 67.34 | INTERLEUKIN-I BETA; CHAIN: A; | COMPLEX |
| | | | | | | | | | TYPE I INTERLEUKIN-I | (IMMUNOGLOBULIN/RECEPTOR) |
| | | | | | | | | | RECEPTOR; CHAIN: B; | IMMUNOGLOBULIN FOLD, |
| | | | | | | | | | | TRANSMEMBRANE, GLYCOPROTEIN, |
| | | | | | | | | | | RECEPTOR, 2 SIGNAL, COMPLEX |
| | | | | | | | | | | (IMMUNOGLOBULIN/RECEPTOR) |
| 262 | 1mco | H | 29 | 427 | 3.4e−68 | | | 93.46 | IMMUNOGLOBULIN | |
| | | | | | | | | | IMMUNOGLOBULIN G1 (IGGI) | |
| | | | | | | | | | (MCG) WITH A HINGE DELETION | |
| | | | | | | | | | IMCO 3 | |
| 262 | 1osp | L | 43 | 241 | 1.7e−59 | | | 69.80 | FAB 184.1; CHAIN: L, H; OUTER | COMPLEX |
| | | | | | | | | | SURFACE PROTEIN A; CHAIN: O; | (IMMUNOGLOBULIN/LIPOPROTEIN) |
| | | | | | | | | | | OSPA; COMPLEX |
| | | | | | | | | | | (IMMUNOGLOBULIN/LIPOPROTEIN), |
| | | | | | | | | | | OUTER SURFACE 2 PROTEIN A |
| | | | | | | | | | | COMPLEXED WITH FAB184.1, |
| | | | | | | | | | | BORRELIA BURGDORFERI 3 STRAIN |
| | | | | | | | | | | B31 |
| 262 | 1wio | A | 49 | 408 | 9e−17 | | | 75.16 | T-CELL SURFACE | GLYCOPROTEIN CD4; |
| | | | | | | | | | GLYCOPROTEIN CD4; CHAIN: A, | IMMUNOGLOBULIN FOLD, |
| | | | | | | | | | B; | TRANSMEMBRANE, GLYCOPROTEIN, |
| | | | | | | | | | | T-CELL, 2 MHC LIPOPROTEIN, |
| | | | | | | | | | | POLYMORPHISM |
| 262 | 2fgw | L | 43 | 241 | 1.2e−67 | | | 67.57 | IMMUNOGLOBULIN FAB | |
| | | | | | | | | | FRAGMENT OF A HUMANIZED | |
| | | | | | | | | | VERSION OF THE ANTI-CD18 | |
| | | | | | | | | | 2FGW 3 ANTIBODY ‘H52’ (HUH52- | |
| | | | | | | | | | OZ FAB) 2FGW 4 | |
| 262 | 6fab | L | 43 | 241 | 5.1e−63 | | | 68.83 | IMMUNOGLOBULIN ANTIGEN- | |
| | | | | | | | | | BINDING FRAGMENT OF THE | |
| | | | | | | | | | MURINE ANTI- | |
| | | | | | | | | | PHENYLARSONATE 6FAB 3 | |
| | | | | | | | | | ANTIBODY 36-71, FAB 36-71 6FAB4 | |
| 263 | 1mhu | | 32 | 62 | 1.4e−17 | | | 67.02 | METALLOTHIONEIN CD-7 | |
| | | | | | | | | | METALLOTHIONEIN-2 (ALPHA | |
| | | | | | | | | | DOMAIN) (/NMR$) 1MHUA 2 | |
| 263 | 4mt2 | | 1 | 62 | 1.7e−08 | | | 126.36 | METALLOTHIONEIN | |
| | | | | | | | | | METALLOTHIONEIN ISOFORM II | |
| | | | | | | | | | 4MT2 3 | |
| 264 | 1ax4 | A | 190 | 616 | 5.1e−l0 | | | 76.11 | TRYPTOPHANASE; CHAIN: A, B, | TRYPTOPHAN BIOSYNTHESIS |
| | | | | | | | | | C, D; | TRYPTOPHAN INDOLE-LYASE; |
| | | | | | | | | | | TRYPTOPHAN BIOSYNTHESIS, |
| | | | | | | | | | | TRYPTOPHAN INDOLE-LYASE, |
| | | | | | | | | | | PYRIDOXAL 2 5′-PHOSPHATE, |
| | | | | | | | | | | MONOVALENT CATION BINDING |
| | | | | | | | | | | SITE |
| 264 | 1bjw | A | 212 | 590 | 5.1e−58 | | | 85.17 | ASPARTATE | AMINOTRANSFERASE |
| | | | | | | | | | AMINOTRANSFERASE; CHAIN: A, | AMINOTRANSFERASE, PYRIDOXAL |
| | | | | | | | | | B; | ENZYME |
| 264 | 1bs0 | A | 203 | 593 | 3.4e−72 | | | 224.70 | 8-AMINO-7-OXONANOATE | TRANSFERASE AONS, 8-AMINO-7- |
| | | | | | | | | | SYNTHASE; CHAIN: A; | KETOPELARGONATE SYNTHASE; |
| | | | | | | | | | | PLP-DEPENDENT ACYL-COA |
| | | | | | | | | | | SYNTHASE, BIOTIN BIOSYNTHESIS, |
| | | | | | | | | | | 8-2 AMINO-7-OXONANOATE |
| | | | | | | | | | | SYNTHASE, 8-AMINO-7- |
| | | | | | | | | | | KETOPELARGONATE 3 SYNTHASE, |
| | | | | | | | | | | TRANSFERASE |
| 264 | 1csl | A | 242 | 640 | 3.4e−45 | | | 79.69 | CYSTATHIONINE GAMMA- | LYASE CGS; LYASE, LLP- |
| | | | | | | | | | SYNTHASE; CHAIN: A, B, C, D; | DEPENDENT ENZYMES, |
| | | | | | | | | | | METHIONINE BIOSYNTHESIS |
| 264 | 1d7u | A | 213 | 597 | 1.7e−46 | | | 78.45 | 2,2-DIALKYLGLYCINE | LYASE DGD; ENZYME COMPLEXES, |
| | | | | | | | | | DECARBOXYLASE (PYRUVATE); | CATALYTIC MECHANISM, |
| | | | | | | | | | CHAIN: A; | DECARBOXYLATION 2 INHIBITOR, |
| | | | | | | | | | | LYASE |
| 264 | 1qgn | A | 215 | 635 | 6e−67 | | | 88.98 | CYSTATHIONINE GAMMA- | LYASE METHIONINE BIOSYNTHESIS, |
| | | | | | | | | | SYNTHASE; CHAIN: A, B, C, D, E, | PYRIDOXAL 5′-PHOSPHATE, |
| | | | | | | | | | F, G, H; | GAMMA-2 FAMILY, LYASE |
| 264 | 1tpl | A | 209 | 612 | 5.1e−06 | | | 86.06 | LYASE(CARBON-CARBON) | |
| | | | | | | | | | TYROSINE PHENOL-LYASE | |
| | | | | | | | | | (E.C.4.1.99.2) ITPL 3 | |
| 264 | 2gsa | A | 170 | 593 | 1.4e−72 | | | 95.88 | GLUTAMATE SEMIALDEHYDE | CHLOROPHYLL BIOSYNTHESIS |
| | | | | | | | | | AMINOTRANSFERASE; CHAIN: A, | GLUTAMATE SEMIALDEHYDE |
| | | | | | | | | | B; | AMINOMUTASE; CHLOROPHYLL |
| | | | | | | | | | | BIOSYNTHESIS, PYRIDOXAL-5′- |
| | | | | | | | | | | PHOSPHATE, 2 PYRIDOXAMINE-5′- |
| | | | | | | | | | | PHOSPHATE, ASYMMETRIC DIMER |
| 266 | 1sur | | 226 | 454 | 3e−31 | | | 66.05 | PAPS REDUCTASE; CHAIN: NULL; | OXIDOREDUCTASE |
| | | | | | | | | | | PHOSPHOADENOSINE |
| | | | | | | | | | | PHOSPHOSULFATE REDUCTASE; |
| | | | | | | | | | | ASSIMILATORY SULFATE |
| | | | | | | | | | | REDUCTION, 3-PHOSPHO- |
| | | | | | | | | | | ADENYLYL-SULFATE 2 REDUCTASE, |
| | | | | | | | | | | OXIDOREDUCTASE |
| 271 | 1gri | A | 7 | 231 | 5.1e−22 | | | 57.45 | GROWTH FACTOR BOUND | SIGNAL TRANSDUCTION ADAPTOR |
| | | | | | | | | | PROTEIN 2; 1GRI 5 CHAIN: A, B; | SH2, SH3 1GRI 14 |
| | | | | | | | | | IGRI 6 | |
| 272 | 1gri | A | 7 | 231 | 5.1e−22 | | | 57.45 | GROWTH FACTOR BOUND | SIGNAL TRANSDUCTION ADAPTOR |
| | | | | | | | | | PROTEIN 2; 1GRI 5 CHAIN: A, B; | SH2, SH3 1GRI 14 |
| | | | | | | | | | IGRI 6 | |
| 273 | 1be3 | H | 22 | 85 | 7.5e−26 | | | 95.55 | CYTOCHROME BCI COMPLEX; | ELECTRON TRANSPORT UBIQUINOL |
| | | | | | | | | | CHAIN: A, B, C, D, E, F, G, H, I, J, K; | CYTOCHROMEC |
| | | | | | | | | | | OXIDOREDUCTASE, COMPLEX |
| | | | | | | | | | | ELECTRON TRANSPORT, |
| | | | | | | | | | | CYTOCHROME, MEMBRANE |
| | | | | | | | | | | PROTEIN |
| 276 | 1dt4 | A | 258 | 304 | 1.5e−09 | −0.52 | 0.07 | | NEURO-ONCOLOGICAL | IMMUNE SYSTEM KH DOMAIN, |
| | | | | | | | | | VENTRAL ANTIGEN I; CHAIN: A; | ALPHA-BETA FOLD, RNA-BINDING |
| | | | | | | | | | | MOTIF |
| 276 | 1dtj | C | 258 | 298 | 3e−06 | −0.27 | 0.75 | | RNA-BINDING | IMMUNE SYSTEM KH DOMAIN, |
| | | | | | | | | | NEUROONCOLOGICAL VENTRAL | ALPHA-BETA FOLD RNA-BINDING |
| | | | | | | | | | ANTIGEN 2; CHAIN: A, B, C, D; | MOTIF |
| 276 | 1dtj | D | 258 | 298 | 3e−06 | −0.30 | 0.93 | | RNA-BINDING | IMMUNE SYSTEM KH DOMAIN, |
| | | | | | | | | | NEUROONCOLOGICAL VENTRAL, | ALPHA-BETA FOLD RNA-BINDING |
| | | | | | | | | | ANTIGEN 2; CHAIN: A, B, C, D; | MOTIF |
| 276 | 1vig | | 258 | 296 | 1.3e−06 | −0.20 | 0.82 | | VIGILIN; 1VIG 5 CHAIN: NULL; | RIBONUCLEOPROTEIN RNA- |
| | | | | | | | | | 1VIG 6 | BINDING PROTEIN 1VIG 19 |
| 276 | 2fmr | | 188 | 252 | 3.4e−31 | 0.53 | 1.00 | | FMR1 PROTEIN; CHAIN: NULL; | RNA-BINDING PROTEIN KH1; FMR1, |
| | | | | | | | | | | FRAGILE X, MODULAR PROTEINS, |
| | | | | | | | | | | RNA-BINDING PROTEIN, NMR |
| 276 | 2fmr | | 188 | 252 | 6e−32 | 0.53 | 1.00 | | FMR1 PROTEIN; CHAIN: NULL; | RNA-BINDlNG PROTEIN KH1; FMR1, |
| | | | | | | | | | | FRAGILE X, MODULAR PROTEINS, |
| | | | | | | | | | | RNA-BINDING PROTEIN, NMR |
| 276 | 2fmr | | 188 | 252 | 6e−32 | | | 96.30 | FMR1 PROTEIN; CHAIN: NULL; | RNA-BINDING PROTEIN KH1; FMR1, |
| | | | | | | | | | | FRAGILE X, MODULAR PROTEINS, |
| | | | | | | | | | | RNA-BINDING PROTEIN, NMR |
| 276 | 1dt4 | A | 258 | 304 | 1.5e−09 | −0.52 | 0.07 | | NEURO-ONCOLOGICAL | IMMUNE SYSTEM KH DOMAIN, |
| | | | | | | | | | VENTRAL ANTIGEN I; CHAIN: A; | ALPHA-BETA FOLD, RNA-BINDING |
| | | | | | | | | | | MOTIF |
| 276 | 1dtj | C | 258 | 298 | 3e−06 | −0.27 | 0.75 | | RNA-BINDING | IMMUNE SYSTEM KH DOMAIN, |
| | | | | | | | | | NEUROONCOLOGICAL VENTRAL | ALPHA-BETA FOLD RNA-BINDING |
| | | | | | | | | | ANTIGEN 2; CHAIN: A, B, C, D; | MOTIF |
| 276 | 1dtj | D | 258 | 298 | 3e−06 | −0.30 | 0.93 | | RNA-BINDING | IMMUNE SYSTEM KH DOMAIN, |
| | | | | | | | | | NEUROONCOLOGICAL VENTRAL | ALPHA-BETA FOLD RNA-BINDING |
| | | | | | | | | | ANTIGEN 2; CHAIN: A, B, C, D; | MOTIF |
| 276 | 1vig | | 258 | 296 | 1.3e−06 | −0.20 | 0.82 | | VIGILIN; IVIG 5 CHAIN: NULL; | RIBONUCLEOPROTEIN RNA- |
| | | | | | | | | | IVIG 6 | BINDING PROTEIN IVIG 19 |
| 276 | 2fmr | | 188 | 252 | 6e−32 | 0.53 | 1.00 | | FMR1 PROTEIN; CHAIN: NULL; | RNA-BINDING PROTEIN KH1; FMR1, |
| | | | | | | | | | | FRAGILE X, MODULAR PROTEINS, |
| | | | | | | | | | | RNA-BINDING PROTEIN, NMR |
| 276 | 2fmr | | 188 | 252 | 6e−32 | | | 96.99 | FMR1 PROTEIN; CHAIN: NULL; | RNA-BINDING PROTEIN KH1; FMR1, |
| | | | | | | | | | | FRAGILE X, MODULAR PROTEINS, |
| | | | | | | | | | | RNA-BINDING PROTEIN, NMR |
| 276 | 2fmr | | 188 | 252 | 8.5e−32 | 0.53 | 1.00 | | FMR1 PROTEIN; CHAIN: NULL; | RNA-BINDING PROTEIN KH1; FMR1, |
| | | | | | | | | | | FRAGILE X, MODULAR PROTEINS, |
| | | | | | | | | | | RNA-BINDING PROTEIN, NMR |
| 277 | 1dt4 | A | 258 | 304 | 1.5e−09 | −0.52 | 0.07 | | NEURO-ONCOLOGICAL | IMMUNE SYSTEM KH DOMAIN, |
| | | | | | | | | | VENTRAL ANTIGEN 1; CHAIN: A; | ALPHA-BETA FOLD, RNA-BINDING |
| | | | | | | | | | | MOTIF |
| 277 | 1dtj | C | 258 | 298 | 3e−06 | −0.27 | 0.75 | | RNA-BINDING | IMMUNE SYSTEM KH DOMAIN, |
| | | | | | | | | | NEUROONCOLOGICAL VENTRAL | ALPHA-BETA FOLD RNA-BINDING |
| | | | | | | | | | ANTIGEN 2; CHAIN: A, B, C, D; | MOTIF |
| 277 | 1dtj | D | 258 | 298 | 3e−06 | −0.30 | 0.93 | | RNA-BINDING | IMMUNE SYSTEM KH DOMAIN, |
| | | | | | | | | | NEUROONCOLOGICAL VENTRAL | ALPHA-BETA FOLD RNA-BINDING |
| | | | | | | | | | ANTIGEN 2; CHAIN: A, B, C, D; | MOTIF |
| 277 | 1vig | | 258 | 296 | 1.3e−06 | −0.20 | 0.82 | | VIGILIN; IVIG 5 CHAIN: NULL; | RIBONUCLEOPROTEIN RNA- |
| | | | | | | | | | IVIG 6 | BINDING PROTEIN IVIG 19 |
| 277 | 2fmr | | 188 | 252 | 3.4e−31 | 0.53 | 1.00 | | FMR1 PROTEIN; CHAIN: NULL; | RNA-BINDING PROTEIN KH1; FMR1, |
| | | | | | | | | | | FRAGILE X, MODULAR PROTEINS, |
| | | | | | | | | | | RNA-BINDING PROTEIN, NMR |
| 277 | 2fmr | | 188 | 252 | 6e−32 | 0.53 | 1.00 | | FMR1 PROTEIN; CHAIN: NULL; | RNA-BINDING PROTEIN KH1; FMR1, |
| | | | | | | | | | | FRAGILE X, MODULAR PROTEINS, |
| | | | | | | | | | | RNA-BINDING PROTEIN, NMR |
| 277 | 2fmr | | 188 | 252 | 6e−32 | | | 96.30 | FMR1 PROTEIN; CHAIN: NULL; | RNA-BINDING PROTEIN KH1; FMR1, |
| | | | | | | | | | | FRAGILE X, MODULAR PROTEINS, |
| | | | | | | | | | | RNA-BINDING PROTEIN, NMR |
| 277 | 1dt4 | A | 258 | 304 | 1.5e−09 | −0.52 | 0.07 | | NEURO-ONCOLOGICAL | IMMUNE SYSTEM KH DOMAIN, |
| | | | | | | | | | VENTRAL ANTIGEN I; CHAIN: A; | ALPHA-BETA FOLD, RNA-BINDING |
| | | | | | | | | | | MOTIF |
| 277 | 1dtj | C | 258 | 298 | 3e−06 | −0.27 | 0.75 | | RNA-BINDING | IMMUNE SYSTEM KH DOMAIN, |
| | | | | | | | | | NEUROONCOLOGICAL VENTRAL | ALPHA-BETA FOLD RNA-BINDING |
| | | | | | | | | | ANTIGEN 2; CHAIN: A, B, C, D; | MOTIF |
| 277 | 1dtj | D | 258 | 298 | 3e−06 | −0.30 | 0.93 | | RNA-BINDING | IMMUNE SYSTEM KH DOMAIN, |
| | | | | | | | | | NEUROONCOLOGICAL VENTRAL | ALPHA-BETA FOLD RNA-BINDING |
| | | | | | | | | | ANTIGEN 2; CHAIN: A, B, C, D; | MOTIF |
| 277 | 1vig | | 258 | 296 | 1.3e−06 | −0.20 | 0.82 | | VIGILIN; IVIG 5 CHAIN: NULL; | RIBONUCLEOPROTEIN RNA- |
| | | | | | | | | | IVIG 6 | BINDING PROTEIN IVIG 19 |
| 277 | 2fmr | | 188 | 252 | 6e−32 | 0.53 | 1.00 | | FMR1 PROTEIN; CHAIN: NULL; | RNA-BINDING PROTEIN KH1; FMR1, |
| | | | | | | | | | | FRAGILE X, MODULAR PROTEINS, |
| | | | | | | | | | | RNA-BINDING PROTEIN, NMR |
| 277 | 2fmr | | 188 | 252 | 6e−32 | | | 96.99 | FMR1 PROTEIN; CHAIN: NULL; | RNA-BINDING PROTEIN KH1; EMRI, |
| | | | | | | | | | | FRAGILE X, MODULAR PROTEINS, |
| | | | | | | | | | | RNA-BINDING PROTEIN, NMR |
| 277 | 2fmr | | 188 | 252 | 8.5e−32 | 0.53 | 1.00 | | FMR1 PROTEIN; CHAIN: NULL; | RNA-BINDING PROTEIN KH1; FMR1, |
| | | | | | | | | | | FRAGILE X, MODULAR PROTEINS, |
| | | | | | | | | | | RNA-BINDING PROTEIN, NMR |
| 278 | 1zbd | A | 35 | 239 | 6.8e−56 | −0.01 | 0.01 | | RAB-3A; CHAIN: A; RABPHILIN- | COMPLEX (GTP-BINDING/EFFECTOR) |
| | | | | | | | | | 3A; CHAIN: B; | RAS-RELATED PROTEIN RAB3A; |
| | | | | | | | | | | COMPLEX (GTP- |
| | | | | | | | | | | BINDING/EFFECTOR), G PROTEIN, |
| | | | | | | | | | | EFFECTOR, RABCDR, 2 SYNAPTIC |
| | | | | | | | | | | EXOCYTOSIS, RAB PROTEIN, RAB3A, |
| | | | | | | | | | | RARPHILIN |
| 278 | 3rab | A | 37 | 236 | 3.4e−56 | 0.14 | −0.07 | | RAB3A; CHAIN: A; | HYDROLASE G PROTEIN, |
| | | | | | | | | | | VESICULAR TRAFFICKING, GTP |
| | | | | | | | | | | HYDROLYSIS, RAB 2 PROTEIN, |
| | | | | | | | | | | NEUROTRANSMITTER RELEASE, |
| | | | | | | | | | | HYDROLASE |
| 280 | 1a88 | A | 225 | 450 | 5.1e−20 | −0.05 | 0.03 | | CHLOROPEROXIDASEL; CHAIN: | HALOPEROXIDASE |
| | | | | | | | | | A, B, C; | BROMOPEROXIDASE L, |
| | | | | | | | | | | HALOPEROXIDASE L; |
| | | | | | | | | | | HALOPEROXIDASE, |
| | | | | | | | | | | OXIDOREDUCTASE |
| 280 | 1azw | A | 225 | 449 | 1e−21 | 0.15 | −0.13 | | PROLINE IMINOPEPTIDASE; | AMINOPEPTIDASE |
| | | | | | | | | | CHAIN: A, B; | AMINOPEPTIDASE, PROLINE |
| | | | | | | | | | | IMINOPEPTIDASE, SERINE |
| | | | | | | | | | | PROTEASE, 2 XANTHOMONAS |
| | | | | | | | | | | CAMPESTRIS |
| 280 | 1brt | | 239 | 451 | 1.7e−20 | 0.07 | 0.22 | | BROMOPEROXIDASE, A2: CHAIN: | HALOPEROXIDASE |
| | | | | | | | | | NULL; | HALOPEROXIDASE A2, |
| | | | | | | | | | | CHLOROPEROXIDASE A2; |
| | | | | | | | | | | HALOPEROXIDASE, |
| | | | | | | | | | | OXIDOREDUCTASE, PEROXIDASE, |
| | | | | | | | | | | ALPHA/BETA 2 HYDROLASE FOLD, |
| | | | | | | | | | | MUTANT M99T |
| 280 | 1cqw | A | 233 | 378 | 5.1e−21 | 0.22 | −0.18 | | HALOALKANE DEHALOGENASE; | HYDROLASE A/B HYDROLASE FOLD, |
| | | | | | | | | | I-CHLOROHEXANE CHAIN: A; | DEHALOGENASE I-S BOND |
| 280 | 1chy | A | 235 | 447 | 1.7e−21 | 0.07 | −0.17 | | SOLUBLE EPOXIDE HYDROLASE; | HYDROLASE HYDROLASE, |
| | | | | | | | | | CHAIN: A, B, C, D; | ALPHA/BETA HYDROLASE FOLD, |
| | | | | | | | | | | EPOXIDE DEGRADATION, 2 |
| | | | | | | | | | | EPICHLOROHYDRIN |
| 280 | 1ekl | B | 220 | 394 | 1.7e−22 | 0.07 | −0.08 | | EPOXIDE HYDROLASE; CHAIN: A, | HYDROLASE HOMODIMER, |
| | | | | | | | | | B; | ALPHA/BETA HYDROLASE FOLD, |
| | | | | | | | | | | DISUBSTITUTED UREA 2 INHIBITOR |
| 280 | 1evq | A | 232 | 438 | 1.7e−20 | 0.34 | 0.24 | | SERINE HYDROLASE; CHAIN: A; | HYDROLASE ALPHA/BETA |
| | | | | | | | | | | HYDROLASE FOLD |
| 280 | 1qfm | A | 157 | 453 | 8.5e−33 | −0.05 | 0.01 | | PROLYL OLIGOPEPTIDASE; | HYDROLASE PROLYL |
| | | | | | | | | | CHAIN: A; | ENDOPEPTIDASE, POST-PROLINE |
| | | | | | | | | | | CLEAVING PROLYL |
| | | | | | | | | | | OLIGOPEPTIDASE, AMNESIA, |
| | | | | | | | | | | ALPHA/BETA-HYDROLASE, BETA-2 |
| | | | | | | | | | | PROPELLER |
| 281 | 1fxx | A | 134 | 302 | 6.8e−27 | −0.08 | 0.23 | | EXONUCLEASE I; CHAIN: A; | HYDROLASE |
| | | | | | | | | | | EXODEOXYRIBONUCLEASE I; |
| | | | | | | | | | | ALPHA-BETA DOMAIN, SH3-LIKE |
| | | | | | | | | | | DOMAIN, DNAQ SUPERFAMILY |
| 282 | 1a44 | | 48 | 232 | 3e−83 | 1.02 | 1.00 | | PHOSPHATIDYLETHANOLAMINE- | LIPID-BINDING PROTEIN PEBP.PBP |
| | | | | | | | | | BINDING PROTEIN; CHAIN: | LIPID-BINDING |
| | | | | | | | | | NULL; | |
| 282 | 1a44 | | 48 | 232 | 3e−83 | | | 317.69 | PHOSPHATIDYLETHANOLAMINE- | LIPID-BINDING PROTEIN PEBP, PBP |
| | | | | | | | | | BINDING PROTEIN; CHAIN: | LIPID-BINDING |
| | | | | | | | | | NULL; | |
| 282 | 1a44 | | 48 | 232 | 6.8e−80 | 1.02 | 1.00 | | PHOSPHATIDYLETHANOLAMINE- | LIPID-BINDING PROTEIN PEBP, PBP |
| | | | | | | | | | BINDING PROTEIN; CHAIN: | LIPID-BINDING |
| | | | | | | | | | NULL; | |
| 282 | 1beh | A | 49 | 232 | 6e−82 | 1.05 | 1.00 | | PHOSPHATIDYLETHANOLAMINE | LIPID-BINDING LIPID-BINDING, |
| | | | | | | | | | BINDING PROTEIN; CHAIN: A, B; | SIGNALLING |
| 282 | 1beh | A | 49 | 232 | 6e−82 | | | 324.00 | PHOSPHATIDYLETHANOLAMINE | LIPID-BINDING LIPID-BINDING, |
| | | | | | | | | | BINDING PROTEIN; CHAIN: A, B; | SIGNALLING |
| 282 | 1beh | A | 49 | 232 | 8.5e−80 | 1.05 | 1.00 | | PHOSPHATIDYLETHANOLAMINE | LIPID-BINDING LIPID-BINDING, |
| | | | | | | | | | BINDING PROTEIN; CHAIN: A, B; | SIGNALLING |
| 283 | 1dga | A | 8 | 376 | 0 | 0.95 | 1.00 | | ACTIN; CHAIN: A; GELSOLIN; | CONTRACTILE PROTEIN ACTIN, |
| | | | | | | | | | CHAIN: G; | GELSOLIN, CYTOSKELETON |
| | | | | | | | | | | ORGANIZATION, ACTIN-2 |
| | | | | | | | | | | ASSOCIATED PROTEIN |
| 283 | 1esv | A | 10 | 376 | 0 | 0.87 | 1.00 | | GELSOLIN; CHAIN: S; ALPHA | CONTRACTILE PROTEIN |
| | | | | | | | | | ACTIN; CHAIN: A | LATRUNCULIN A, GELSOLIN, ACTIN, |
| | | | | | | | | | | DEPOLYMERISATION, 2 |
| | | | | | | | | | | SEQUESTRATION |
| 283 | 1yag | A | 8 | 376 | 0 | 0.99 | 1.00 | | ACTIN; CHAIN: A; GELSOLIN; | CONTRACTILE PROTEIN ACTIN- |
| | | | | | | | | | CHAIN: G; | DEPOLYMERIZING FACTOR (ADF); |
| | | | | | | | | | | COMPLEX, ACTIN, GELSOLIN, |
| | | | | | | | | | | CONTRACTILE PROTEIN |
| 283 | 1yag | A | 8 | 376 | 0 | | | 413.68 | ACTIN; CHAIN: A; GELSOLIN; | CONTRACTILE PROTEIN ACTIN- |
| | | | | | | | | | CHAIN: G; | DEPOLYMERIZING FACTOR (ADF); |
| | | | | | | | | | | COMPLEX, ACTIN, GELSOLIN, |
| | | | | | | | | | | CONTRACTILE PROTEIN |
| 283 | 2btf | A | 7 | 376 | 0 | 0.91 | 1.00 | | ACETYLATION AND ACTIN- | |
| | | | | | | | | | BINDING BETA-ACTIN-PROFILIN | |
| | | | | | | | | | COMPLEX 2BTF 3 | |
| 283 | 2btf | A | 9 | 376 | 0 | | | 414.62 | ACETYLATION AND ACTIN- | |
| | | | | | | | | | BINDING BETA-ACTIN-PROFILIN | |
| | | | | | | | | | COMPLEX 2BTF 3 | |
| 284 | 1tub | A | 1 | 461 | 0 | | | 285.64 | TUBULIN; CHAIN: A, B; | MICROTUBULES MICROTUBULES, |
| | | | | | | | | | | ALPHA-TUBULIN, BETA-TUBULIN, |
| | | | | | | | | | | GTPASE HELIX |
| 284 | 1tub | A | 1 | 462 | 0 | 0.09 | 1.00 | | TUBULIN; CHAIN: A, B; | MICROTUBULES MICROTUBULES, |
| | | | | | | | | | | ALPHA-TUBULIN, BETA-TUBULIN, |
| | | | | | | | | | | GTPASE HELIX |
| 284 | 1tub | B | 1 | 459 | 0 | 0.11 | 1.00 | | TUBULIN; CHAIN: A, B; | MICROTUBULES MICROTUBULES, |
| | | | | | | | | | | ALPHA-TUBULIN, BETA-TUBULIN, |
| | | | | | | | | | | GTPASE HELIX |
| 284 | 1tub | B | 1 | 459 | 0 | | | 307.13 | TUBULIN; CHAIN: A, B; | MICROTUBULES MICROTUBULES, |
| | | | | | | | | | | ALPHA-TUBULIN, BETA-TUBULIN, |
| | | | | | | | | | | GTPASE HELIX |
| 285 | 1a7i | | 384 | 437 | 3e−14 | 0.43 | 0.58 | | QCRP2 (LIM1); CHAIN: NULL; | LIM DOMAIN CONTAINING |
| | | | | | | | | | | PROTEINS LIM DOMAIN |
| | | | | | | | | | | CONTAINING PROTEINS, METAL- |
| | | | | | | | | | | BINDING PROTEIN, ZINC 2 FINGER |
| 285 | 1a7i | | 384 | 441 | 6.8e−10 | 0.31 | 0.80 | | QCRP2 (LIM1); CHAIN: NULL; | LIM DOMAIN CONTAINING |
| | | | | | | | | | | PROTEINS LIM DOMAIN |
| | | | | | | | | | | CONTAINING PROTEINS, METAL- |
| | | | | | | | | | | BINDING PROTEIN, ZINC 2 FINGER |
| 285 | 1a7i | | 443 | 500 | 1.5e−16 | 0.08 | 0.58 | | QCRP2 (LIM1); CHAIN: NULL; | LIM DOMAIN CONTAINING |
| | | | | | | | | | | PROTEINS LIM DOMAIN |
| | | | | | | | | | | CONTAINING PROTEINS, METAL- |
| | | | | | | | | | | BINDING PROTEIN, ZINC 2 FINGER |
| 285 | 1a7i | | 443 | 501 | 1.4e−12 | −0.13 | 0.82 | | QCRP2 (LIM1); CHAIN: NULL; | LIM DOMAIN CONTAINING |
| | | | | | | | | | | PROTEINS LIM DOMAIN |
| | | | | | | | | | | CONTAINING PROTEINS, METAL- |
| | | | | | | | | | | BINDING PROTEIN, ZINC 2 FINGER |
| 285 | 1a7i | | 504 | 566 | 4.5e−11 | −0.40 | 0.24 | | QCRP2 (LIM1); CHAIN: NULL; | LIM DOMAIN CONTAINING |
| | | | | | | | | | | PROTEINS LIM DOMAIN |
| | | | | | | | | | | CONTAINING PROTEINS, METAL- |
| | | | | | | | | | | BINDING PROTEIN, ZINC 2 FINGER |
| 285 | 1a7i | | 504 | 571 | 1.2e−09 | 0.38 | 0.76 | | QCRP2 (LIM1); CHAIN: NULL; | LIM DOMAIN CONTAINING |
| | | | | | | | | | | PROTEINS LIM DOMAIN |
| | | | | | | | | | | CONTAINING PROTEINS, METAL- |
| | | | | | | | | | | BINDING PROTEIN, ZINC 2 FINGER |
| 285 | 1b8t | A | 375 | 572 | 1.4e−23 | | | 71.26 | CRP1; CHAIN: A; | CONTRACTILE LIM DOMAIN, CRP, |
| | | | | | | | | | | NMR, MUSCLE DIFFERENTIATION, |
| | | | | | | | | | | CONTRACTILE |
| 285 | 1b8t | A | 379 | 510 | 1.4e−23 | 0.01 | −0.17 | | CRP1; CHAIN: A; | CONTRACTILE LIM DOMAIN, CRP, |
| | | | | | | | | | | NMR, MUSCLE DIFFERENTIATION, |
| | | | | | | | | | | CONTRACTILE |
| 285 | 1ctl | | 376 | 437 | 1.7e−12 | −0.22 | 0.10 | | AVIAN CYSTEINE RICH PROTEIN; | METAL-BINDING PROTEIN LIM |
| | | | | | | | | | 1CTL 3 | DOMAIN CONTAINING PROTEINS |
| | | | | | | | | | | 1CTL 15 |
| 285 | 1ctl | | 444 | 510 | 3.4e−15 | −0.26 | 0.05 | | AVIAN CYSTEINE RICH PROTEIN; | METAL-BINDING PROTEIN LIM |
| | | | | | | | | | 1CTL 3 | DOMAIN CONTAINING PROTEINS |
| | | | | | | | | | | 1CTL 15 |
| 285 | 1ctl | | 504 | 571 | 5.1e−13 | 0.03 | 0.22 | | AVIAN CYSTEINE RICH PROTEIN; | METAL-BINDING PROTEIN LIM |
| | | | | | | | | | 1CTL 3 | DOMAIN CONTAINING PROTEINS |
| | | | | | | | | | | 1CTL 15 |
| 285 | 1cxx | A | 381 | 437 | 1.7e−11 | −0.17 | 0.41 | | CYSTEINE AND GLYCINE-RICH | SIGNALING PROTEIN LIM DOMAIN |
| | | | | | | | | | PROTEIN CRP2; CHAIN: A; | CONTAINING PROTEINS, METAL- |
| | | | | | | | | | | BINDING PROTEIN |
| 285 | 1cxx | A | 443 | 496 | 5.1e−13 | 0.38 | 0.53 | | CYSTEINE AND GLYCINE-RICH | SIGNALING PROTEIN LIM DOMAIN |
| | | | | | | | | | PROTEIN CRP2; CHAIN: A; | CONTAINING PROTEINS, METAL- |
| | | | | | | | | | | BINDING PROTEIN |
| 285 | 1cxx | A | 501 | 568 | 3.4e−12 | 0.41 | 0.87 | | CYSTEINE AND GLYCINE-RICH | SIGNALING PROTEIN LIM DOMAIN |
| | | | | | | | | | PROTEIN CRP2; CHAIN: A; | CONTAINING PROTEINS, METAL- |
| | | | | | | | | | | BINDING PROTEIN |
| 285 | 1iml | | 382 | 440 | 1.4e−10 | −0.25 | 0.41 | | CYSTEINE RICH INTESTINAL | METAL-BINDING PROTEIN CRIP; |
| | | | | | | | | | PROTEIN; CHAIN: NULL; | METAL-BINDING PROTEIN, LIM |
| | | | | | | | | | | DOMAIN PROTEIN |
| 285 | 1iml | | 384 | 451 | 4.5e−17 | 0.21 | 0.22 | | CYSTEINE RICH INTESTINAL | METAL-BINDING PROTEIN CRIP; |
| | | | | | | | | | PROTEIN; CHAIN: NULL; | METAL-BINDING PROTEIN, LIM |
| | | | | | | | | | | DOMAIN PROTEIN |
| 285 | 1iml | | 443 | 510 | 1.4e−15 | −0.13 | 0.09 | | CYSTEINE RICH INTESTINAL | METAL-BINDING PROTEIN CRIP; |
| | | | | | | | | | PROTEIN; CHAIN: NULL; | METAL-BINDING PROTEIN, LIM |
| | | | | | | | | | | DOMAIN PROTEIN |
| 285 | 1iml | | 443 | 513 | 3e−20 | 0.13 | 0.12 | | CYSTEINE RICH INTESTINAL | METAL-BINDING PROTEIN CRIP; |
| | | | | | | | | | PROTEIN; CHAIN: NULL; | METAL-BINDING PROTEIN, LIM |
| | | | | | | | | | | DOMAIN PROTEIN |
| 285 | 1iml | | 502 | 569 | 1.5e−12 | 0.32 | 0.93 | | CYSTEINE RICH INTESTINAL | METAL-BINDING PROTEIN CRIP; |
| | | | | | | | | | PROTEIN; CHAIN: NULL; | METAL-BINDING PROTEIN, LIM |
| | | | | | | | | | | DOMAIN PROTEIN |
| 285 | 1iml | | 502 | 571 | 3.4e−11 | 0.28 | 0.99 | | CYSTEINE RICH INTESTINAL | METAL-BINDING PROTEIN CRIP; |
| | | | | | | | | | PROTEIN; CHAIN: NULL; | METAL-BINDING PROTEIN, LIM |
| | | | | | | | | | | DOMAIN PROTEIN |
| 285 | 1zfo | | 381 | 410 | 1.4e−06 | −0.13 | 0.29 | | LASP-1; CHAIN: NULL; | METAL-BINDING PROTEIN LIM |
| | | | | | | | | | | DOMAIN, ZINC-FINGER, METAL- |
| | | | | | | | | | | BINDING PROTEIN |
| 285 | 1zfo | | 502 | 535 | 0.0012 | −0.34 | 0.15 | | LASP-1; CHAIN: NULL; | METAL-BINDING PROTEIN LIM |
| | | | | | | | | | | DOMAIN, ZINC-FINGER, METAL- |
| | | | | | | | | | | BINDING PROTEIN |
| 288 | 1ffk | G | 5 | 114 | 9e−49 | −0.14 | 1.00 | | 23S RRNA; CHAIN: 0; 5S RRNA; | RIBOSOME 50S RIBOSOMAL |
| | | | | | | | | | CHAIN: 9; RIBOSOMAL PROTEIN | PROTEIN L2P, HMAL2, HL4; 50S |
| | | | | | | | | | L2; CHAIN: A; RIBOSOMAL | RIBOSOMAL PROTEIN L3P, HMAL3, |
| | | | | | | | | | PROTEIN L3; CHAIN: B; | HL1; 50S RIBOSOMAL PROTEIN L4E, |
| | | | | | | | | | RIBOSOMAL PROTEIN L4; CHAIN: | HMAL4, HL6; 50S RIBOSOMAL |
| | | | | | | | | | C; RIBOSOMAL PROTEIN L5; | PROTEIN L5P, HMAL5, HL13; 30S |
| | | | | | | | | | CHAIN: D; RIBOSOMAL PROTEIN | RIBOSOMAL PROTEIN HS6; 50S |
| | | | | | | | | | L7AE; CHAIN: E; RIBOSOMAL | RIBOSOMAL PROTEIN L13P, HMAL13; |
| | | | | | | | | | PROTEIN L10E; CHAIN: F; | 50S RIBOSOMAL PROTEIN L14P, |
| | | | | | | | | | RIBOSOMAL PROTEIN L13; | HMAL14, HL27; 50S RIBOSOMAL |
| | | | | | | | | | CHAIN: G; RIBOSOMAL PROTEIN | PROTEIN L15P, HMAL15, HL9; 50S |
| | | | | | | | | | L14; CHAIN: H; RIBOSOMAL | RIBOSOMAL PROTEIN L18P, HMAL18, |
| | | | | | | | | | PROTEIN L15E; CHAIN: I; | HL12; 50S RIBOSOMAL PROTEIN |
| | | | | | | | | | RIBOSOMAL PROTEIN L15; | L18E, HL29, L19; 50S RIBOSOMAL |
| | | | | | | | | | CHAIN: J; RIBOSOMAL PROTEIN | PROTEIN L19E, HMAL19, HL24; 50S |
| | | | | | | | | | L18; CHAIN: K; RIBOSOMAL | RIBOSOMAL PROTEIN L21E, HL31; |
| | | | | | | | | | PROTEIN L18E; CHAIN: L; | 50S RIBOSOMAL PROTEIN L22P, |
| | | | | | | | | | RIBOSOMAL PROTEIN L19; | HMAL22, HL23; 50S RIBOSOMAL |
| | | | | | | | | | CHAIN: M; RIBOSOMAL PROTEIN | PROTEIN L23P, HMAL23, HL25, L21; |
| | | | | | | | | | L21E; CHAIN: N; RIBOSOMAL | 50S RIBOSOMAL PROTEIN L24P, |
| | | | | | | | | | PROTEIN L22; CHAIN: O; | HMAL24, HL16, HL15; 50S |
| | | | | | | | | | RIBOSOMAL PROTEIN L23; | RIBOSOMAL PROTEIN L24E, |
| | | | | | | | | | CHAIN: P; RIBOSOMAL PROTEIN | HL21/HL22; 50S RIBOSOMAL |
| | | | | | | | | | L24; CHAIN: Q; RIBOSOMAL | PROTEIN L29P, HMAL29, HL33; 50S |
| | | | | | | | | | PROTEIN L24E; CHAIN: R; | RIBOSOMAL PROTEIN L30P, HMAL30, |
| | | | | | | | | | RIBOSOMAL PROTEIN L29; | HL20, HL16; 50S RIBOSOMAL |
| | | | | | | | | | CHAIN: S; RIBOSOMAL PROTEIN | PROTEIN L31E, L34, HL30; 50S |
| | | | | | | | | | L30; CHAIN: T; RIBOSOMAL | RIBOSOMAL PROTEIN L32E, HL5; 50S |
| | | | | | | | | | PROTEIN L31E; CHAIN: U; | RIBOSOMAL PROTEIN L37E, L35E; |
| | | | | | | | | | RIBOSOMAL PROTEIN L32E; | 50S RIBOSOMAL PROTEINS L39E, |
| | | | | | | | | | CHAIN: V; RIBOSOMAL PROTEIN | HL39E, HL46E; 50S RIBOSOMAL |
| | | | | | | | | | L37AE; CHAIN: W; RIBOSOMAL | PROTEIN L44E, LA, HLA; 50S |
| | | | | | | | | | PROTEIN L37E; CHAIN: X; | RIBOSOMAL PROTEIN L6P, HMAL6, |
| | | | | | | | | | RIBOSOMAL PROTEIN L39E; | HL10 RIBOSOME ASSEMBLY, RNA- |
| | | | | | | | | | CHAIN: Y; RIBOSOMAL PROTEIN | RNA, PROTEIN-RNA, PROTEIN- |
| | | | | | | | | | L44E; CHAIN: Z; RIBOSOMAL | PROTEIN |
| | | | | | | | | | PROTEIN L6; CHAIN: 1; | |
| 288 | 1ffk | G | 7 | 135 | 5.1e−32 | 0.18 | 1.00 | | 23S RRNA; CHAIN: 0; 5S RRNA; | RIBOSOME 50S RIBOSOMAL |
| | | | | | | | | | CHAIN: 9; RIBOSOMAL PROTEIN | PROTEIN L2P, HMAL2, HL4; 50S |
| | | | | | | | | | L2; CHAIN: A; RIBOSOMAL | RIBOSOMAL PROTEIN L3P, HMAL3, |
| | | | | | | | | | PROTEIN L3; CHAIN: B; | HL1; 50S RIBOSOMAL PROTEIN L4E, |
| | | | | | | | | | RIBOSOMAL PROTEIN L4; CHAIN: | HMAL4, HL6; 50S RIBOSOMAL |
| | | | | | | | | | C; RIBOSOMAL PROTEIN L5; | PROTEIN L5P, HMAL5, HL13; 30S |
| | | | | | | | | | CHAIN: D; RIBOSOMAL PROTEIN | RIBOSOMAL PROTEIN HS6; 50S |
| | | | | | | | | | L7AE; CHAIN: E; RIBOSOMAL | RIBOSOMAL PROTEIN L13P, HMAL13; |
| | | | | | | | | | PROTEIN L10E; CHAIN: F; | 50S RIBOSOMAL PROTEIN L14P, |
| | | | | | | | | | RIBOSOMAL PROTEIN L13; | HMAL14, HL27; 50S RIBOSOMAL |
| | | | | | | | | | CHAIN: G; RIBOSOMAL PROTEIN | PROTEIN L15P, HMAL15, HL9; 50S |
| | | | | | | | | | L14; CHAIN: H; RIBOSOMAL | RIBOSOMAL PROTEIN L18P, HMAL18, |
| | | | | | | | | | PROTEIN L15E; CHAIN: I; | HL12; 50S RIBOSOMAL PROTEIN |
| | | | | | | | | | RIBOSOMAL PROTEIN L15; | L18E, HL29, L19; 50S RIBOSOMAL |
| | | | | | | | | | CHAIN: J; RIBOSOMAL PROTEIN | PROTEIN L19E, HMAL19, HL24; 50S |
| | | | | | | | | | L18; CHAIN: K; RIBOSOMAL | RIBOSOMAL PROTEIN L21E, HL31; |
| | | | | | | | | | PROTEIN L18E; CHAIN: L; | 50S RIBOSOMAL PROTEIN L22P, |
| | | | | | | | | | RIBOSOMAL PROTEIN L19; | HMAL22, HL23; 50S RIBOSOMAL |
| | | | | | | | | | CHAIN: M; RIBOSOMAL PROTEIN | PROTEIN L23P, HMAL23, HL25, L21; |
| | | | | | | | | | L21E; CHAIN: N; RIBOSOMAL | 50S RIBOSOMAL PROTEIN L24P, |
| | | | | | | | | | PROTEIN L22; CHAIN: O; | HMAL24, HL16, HL15; 50S |
| | | | | | | | | | RIBOSOMAL PROTEIN L23; | RIBOSOMAL PROTEIN L24E, |
| | | | | | | | | | CHAIN: P; RIBOSOMAL PROTEIN | HL21/HL22; 50S RIBOSOMAL |
| | | | | | | | | | L24; CHAIN: Q; RIBOSOMAL | PROTEIN L29P, HMAL29, HL33; 50S |
| | | | | | | | | | PROTEIN L24E; CHAIN: R; | RIBOSOMAL PROTEIN L30P, HMAL30, |
| | | | | | | | | | RIBOSOMAL PROTEIN L29; | HL20, HL16; 50S RIBOSOMAL |
| | | | | | | | | | CHAIN: S; RIBOSOMAL PROTEIN | PROTEIN L31E, L34, HL30; 50S |
| | | | | | | | | | L30; CHAIN: T; RIBOSOMAL | RIBOSOMAL PROTEIN L32E, HL5; 50S |
| | | | | | | | | | PROTEIN L31E; CHAIN: U; | RIBOSOMAL PROTEIN L37E, L35E; |
| | | | | | | | | | RIBOSOMAL PROTEIN L32E; | 50S RIBOSOMAL PROTEINS L39E, |
| | | | | | | | | | CHAIN: V; RIBOSOMAL PROTEIN | HL39E, HL46E; 50S RIBOSOMAL |
| | | | | | | | | | L37AE; CHAIN: W; RIBOSOMAL | PROTEIN L44E, LA, HLA; 50S |
| | | | | | | | | | PROTEIN L37E; CHAIN: X; | RIBOSOMAL PROTEIN L6P, HMAL6, |
| | | | | | | | | | RIBOSOMAL PROTEIN L39E; | HL10 RIBOSOME ASSEMBLY, RNA- |
| | | | | | | | | | CHAIN: Y; RIBOSOMAL PROTEIN | RNA, PROTEIN-RNA, PROTEIN- |
| | | | | | | | | | L44E; CHAIN: Z; RIBOSOMAL | PROTEIN |
| | | | | | | | | | PROTEIN L6; CHAIN: I; | |
| 289 | 1alh | A | 1023 | 1104 | 1.4e−40 | 0.06 | 0.98 | | QGSR ZINC FINGER PEPTIDE; | COMPLEX (ZINC FINGER/DNA) |
| | | | | | | | | | CHAIN: A; DUPLEX | COMPLEX (ZINC FINGER/DNA), ZINC |
| | | | | | | | | | OLIGONUCLEOTIDE BINDING | FINGER, DNA-BINDING PROTEIN |
| | | | | | | | | | SITE; CHAIN: B, C; | |
| 289 | 1alh | A | 1051 | 1132 | 9e−44 | 0.09 | 0.84 | | QGSR ZINC FINGER PEPTIDE; | COMPLEX (ZINC FINGER/DNA) |
| | | | | | | | | | CHAIN: A; DUPLEX | COMPLEX (ZINC FINGER/DNA), ZINC |
| | | | | | | | | | OLIGONUCLEOTIDE BINDING | FINGER, DNA-BINDING PROTEIN |
| | | | | | | | | | SITE; CHAIN: B, C; | |
| 289 | 1alh | A | 1611 | 1715 | 1.2e−39 | 0.04 | 0.46 | | QGSR ZINC FINGER PEPTIDE; | COMPLEX (ZINC FINGER/DNA) |
| | | | | | | | | | CHAIN: A; DUPLEX | COMPLEX (ZINC FINGER/DNA), ZINC |
| | | | | | | | | | OLIGONUCLEOTIDE BINDING | FINGER, DNA-BINDING PROTEIN |
| | | | | | | | | | SITE; CHAIN: B, C; | |
| 289 | 1alh | A | 1826 | 1906 | 1.7e−30 | −0.47 | 0.45 | | QGSR ZINC FINGER PEPTIDE; | COMPLEX (ZINC FINGER/DNA) |
| | | | | | | | | | CHAIN: A; DUPLEX | COMPLEX (ZINC FINGER/DNA), ZINC |
| | | | | | | | | | OLIGONUCLEOTIDE BINDING | FINGER, DNA-BINDING PROTEIN |
| | | | | | | | | | SITE; CHAIN: B, C; | |
| 289 | 1alh | A | 1854 | 1934 | 6.8e−31 | −0.10 | 0.05 | | QGSR ZINC FINGER PEPTIDE; | COMPLEX (ZINC FINGER/DNA) |
| | | | | | | | | | CHAIN: A; DUPLEX | COMPLEX (ZINC FINGER/DNA), ZINC |
| | | | | | | | | | OLIGONUCLEOTIDE BINDING | FINGER, DNA-BINDING PROTEIN |
| | | | | | | | | | SITE; CHAIN: B, C; | |
| 289 | 1alh | A | 559 | 639 | 5.1e−27 | 0.05 | 0.17 | | QGSR ZINC FINGER PEPTIDE; | COMPLEX (ZINC FINGER/DNA) |
| | | | | | | | | | CHAIN: A; DUPLEX | COMPLEX (ZINC FINGER/DNA), ZINC |
| | | | | | | | | | OLIGONUCLEOTIDE BINDING | FINGER, DNA-BINDING PROTEIN |
| | | | | | | | | | SITE; CHAIN: B, C; | |
| 289 | 1alh | A | 592 | 668 | 1.5e−29 | 0.15 | 0.11 | | QGSR ZINC FINGER PEPTIDE; | COMPLEX (ZINC FINGER/DNA) |
| | | | | | | | | | CHAIN: A; DUPLEX | COMPLEX (ZINC FINGER/DNA), ZINC |
| | | | | | | | | | OLIGONUCLEOTIDE BINDING | FINGER, DNA-BINDING PROTEIN |
| | | | | | | | | | SITE; CHAIN: B, C; | |
| 289 | 1alh | A | 911 | 992 | 6e−45 | 0.22 | 0.93 | | QGSR ZINC FINGER PEPTIDE; | COMPLEX (ZINC FINGER/DNA) |
| | | | | | | | | | CHAIN: A; DUPLEX | COMPLEX (ZINC FINGER/DNA), ZINC |
| | | | | | | | | | OLIGONUCLEOTIDE BINDING | FINGER, DNA-BINDING PROTEIN |
| | | | | | | | | | SITE; CHAIN: B, C; | |
| 289 | 1alh | A | 939 | 1020 | 3e−42 | 0.04 | 0.72 | | QGSR ZINC FINGER PEPTIDE; | COMPLEX (ZINC FINGER/DNA) |
| | | | | | | | | | CHAIN: A; DUPLEX | COMPLEX (ZINC FINGER/DNA), ZINC |
| | | | | | | | | | OLIGONUCLEOTIDE BINDING | FINGER, DNA-BINDING PROTEIN |
| | | | | | | | | | SITE; CHAIN: B, C; | |
| 289 | 1alh | A | 967 | 1047 | 4.5e−42 | −0.00 | 0.78 | | QGSR ZINC FINGER PEPTIDE; | COMPLEX (ZINC FINGER/DNA) |
| | | | | | | | | | CHAIN: A; DUPLEX | COMPLEX (ZINC FINGER/DNA), ZINC |
| | | | | | | | | | OLIGONUCLEOTIDE BINDING | FINGER, DNA-BINDING PROTEIN |
| | | | | | | | | | SITE; CHAIN: B, C; | |
| 289 | 1alh | A | 995 | 1075 | 9e−42 | 0.21 | 1.00 | | QGSR ZINC FINGER PEPTIDE; | COMPLEX (ZINC FINGER/DNA) |
| | | | | | | | | | CHAIN: A; DUPLEX | COMPLEX (ZINC FINGER/DNA), ZINC |
| | | | | | | | | | OLIGONUCLEOTIDE BINDING | FINGER, DNA-BINDING PROTEIN |
| | | | | | | | | | SITE; CHAIN: B, C; | |
| 289 | 1mey | C | 1022 | 1103 | 1.4e−39 | 0.28 | 1.00 | | DNA; CHAIN: A, B, D, E; | COMPLEX (ZINC FINGER/DNA) ZINC |
| | | | | | | | | | CONSENSUS ZINC FINGER | FINGER, PROTEIN-DNA |
| | | | | | | | | | PROTEIN; CHAIN: C, F, G; | INTERACTION, PROTEIN DESIGN, 2 |
| | | | | | | | | | | CRYSTAL STRUCTURE, COMPLEX |
| | | | | | | | | | | (ZINC FINGER/DNA) |
| 289 | 1mey | C | 1050 | 1131 | 1.7e−41 | 0.34 | 1.00 | | DNA; CHAIN: A, B, D, E; | COMPLEX (ZINC FINGER/DNA) ZINC |
| | | | | | | | | | CONSENSUS ZINC FINGER | FINGER, PROTEIN-DNA |
| | | | | | | | | | PROTEIN; CHAIN: C, F, G; | INTERACTION, PROTEIN DESIGN, 2 |
| | | | | | | | | | | CRYSTAL STRUCTURE, COMPLEX |
| | | | | | | | | | | (ZINC FINGER/DNA) |
| 289 | 1mey | C | 1078 | 1159 | 1.7e−43 | 0.35 | 1.00 | | DNA; CHAIN: A, B, D, E; | COMPLEX (ZINC FINGER/DNA) ZINC |
| | | | | | | | | | CONSENSUS ZINC FINGER | FINGER, PROTEIN-DNA |
| | | | | | | | | | PROTEIN; CHAIN: C, F, G; | INTERACTION, PROTEIN DESIGN, 2 |
| | | | | | | | | | | CRYSTAL STRUCTURE, COMPLEX |
| | | | | | | | | | | (ZINC FINGER/DNA) |
| 289 | 1mey | C | 1106 | 1187 | 3.4e−45 | 0.16 | 1.00 | | DNA; CHAIN: A, B, D, E; | COMPLEX (ZINC FINGER/DNA) ZINC |
| | | | | | | | | | CONSENSUS ZINC FINGER | FINGER, PROTEIN-DNA |
| | | | | | | | | | PROTEIN; CHAIN: C, F, G; | INTERACTION, PROTEIN DESIGN, 2 |
| | | | | | | | | | | CRYSTAL STRUCTURE, COMPLEX |
| | | | | | | | | | | (ZINC FINGER/DNA) |
| 289 | 1mey | C | 1134 | 1215 | 6.8e−47 | −0.08 | 1.00 | | DNA; CHAIN: A, B, D, E; | COMPLEX (ZINC FINGER/DNA) ZINC |
| | | | | | | | | | CONSENSUS ZINC FINGER | FINGER, PROTEIN-DNA |
| | | | | | | | | | PROTEIN; CHAIN: C, F, G; | INTERACTION, PROTEIN DESIGN, 2 |
| | | | | | | | | | | CRYSTAL STRUCTURE, COMPLEX |
| | | | | | | | | | | (ZINC FINGER/DNA) |
| 289 | 1mey | C | 1162 | 1243 | 5.1e−48 | 0.45 | 1.00 | | DNA; CHAIN: A, B, D, E; | COMPLEX (ZINC FINGER/DNA) ZINC |
| | | | | | | | | | CONSENSUS ZINC FINGER | FINGER, PROTEIN-DNA |
| | | | | | | | | | PROTEIN; CHAIN: C, F, G; | INTERACTION, PROTEIN DESIGN, 2 |
| | | | | | | | | | | CRYSTAL STRUCTURE, COMPLEX |
| | | | | | | | | | | (ZINC FINGER/DNA) |
| 289 | 1mey | C | 1190 | 1271 | 1.7e−48 | 0.44 | 1.00 | | DNA; CHAIN: A, B, D, E; | COMPLEX (ZINC FINGER/DNA) ZINC |
| | | | | | | | | | CONSENSUS ZINC FINGER | FINGER, PROTEIN-DNA |
| | | | | | | | | | PROTEIN; CHAIN: C, F, G; | INTERACTION, PROTEIN DESIGN, 2 |
| | | | | | | | | | | CRYSTAL STRUCTURE, COMPLEX |
| | | | | | | | | | | (ZINC FINGER/DNA) |
| 289 | 1mey | C | 1218 | 1299 | 1.4e−49 | 0.22 | 1.00 | | DNA; CHAIN: A, B, D, E; | COMPLEX (ZINC FINGER/DNA) ZINC |
| | | | | | | | | | CONSENSUS ZINC FINGER | FINGER, PROTEIN-DNA |
| | | | | | | | | | PROTEIN; CHAIN: C, F, G; | INTERACTION, PROTEIN DESIGN, 2 |
| | | | | | | | | | | CRYSTAL STRUCTURE, COMPLEX |
| | | | | | | | | | | (ZINC FINGER/DNA) |
| 289 | 1mey | C | 1246 | 1327 | 1.4e−49 | 0.05 | 1.00 | | DNA; CHAIN: A, B, D, E; | COMPLEX (ZINC FINGER/DNA) ZINC |
| | | | | | | | | | CONSENSUS ZINC FINGER | FINGER, PROTEIN-DNA |
| | | | | | | | | | PROTEIN; CHAIN: C, F, G; | INTERACTION, PROTEIN DESIGN, 2 |
| | | | | | | | | | | CRYSTAL STRUCTURE, COMPLEX |
| | | | | | | | | | | (ZINC FINGER/DNA) |
| 289 | 1mey | C | 1274 | 1355 | 3.4e−50 | 0.29 | 1.00 | | DNA; CHAIN: A, B, D, E; | COMPLEX (ZINC FINGER/DNA) ZINC |
| | | | | | | | | | CONSENSUS ZINC FINGER | FINGER, PROTEIN-DNA |
| | | | | | | | | | PROTEIN; CHAIN: C, F, G; | INTERACTION, PROTEIN DESIGN, 2 |
| | | | | | | | | | | CRYSTAL STRUCTURE, COMPLEX |
| | | | | | | | | | | (ZINC FINGER/DNA) |
| 289 | 1mey | C | 1302 | 1383 | 3.4e−49 | 0.04 | 1.00 | | DNA; CHAIN: A, B, D, E; | COMPLEX (ZINC FINGER/DNA) ZINC |
| | | | | | | | | | CONSENSUS ZINC FINGER | FINGER, PROTEIN-DNA |
| | | | | | | | | | PROTEIN; CHAIN: C, F, G; | INTERACTION, PROTEIN DESIGN, 2 |
| | | | | | | | | | | CRYSTAL STRUCTURE, COMPLEX |
| | | | | | | | | | | (ZINC FINGER/DNA) |
| 289 | 1mey | C | 1330 | 1411 | 1e−47 | 0.24 | 0.99 | | DNA; CHAIN: A, B, D, E; | COMPLEX (ZINC FINGER/DNA) ZINC |
| | | | | | | | | | CONSENSUS ZINC FINGER | FINGER, PROTEIN-DNA |
| | | | | | | | | | PROTEIN; CHAIN: C, F, G; | INTERACTION, PROTEIN DESIGN, 2 |
| | | | | | | | | | | CRYSTAL STRUCTURE, COMPLEX |
| | | | | | | | | | | (ZINC FINGER/DNA) |
| 289 | 1mey | C | 1358 | 1439 | 8.5e−47 | 0.50 | 1.00 | | DNA; CHAIN: A, B, D, E; | COMPLEX (ZINC FINGER/DNA) ZINC |
| | | | | | | | | | CONSENSUS ZINC FINGER | FINGER, PROTEIN-DNA |
| | | | | | | | | | PROTEIN; CHAIN: C, F, G; | INTERACTION, PROTEIN DESIGN, 2 |
| | | | | | | | | | | CRYSTAL STRUCTURE, COMPLEX |
| | | | | | | | | | | (ZINC FINGER/DNA) |
| 289 | 1mey | C | 1386 | 1467 | 1.7e−47 | 0.31 | 1.00 | | DNA; CHAIN: A, B, D, E; | COMPLEX (ZINC FINGER/DNA) ZINC |
| | | | | | | | | | CONSENSUS ZINC FINGER | FINGER, PROTEIN-DNA |
| | | | | | | | | | PROTEIN; CHAIN: C, F, G; | INTERACTION, PROTEIN DESIGN, 2 |
| | | | | | | | | | | CRYSTAL STRUCTURE, COMPLEX |
| | | | | | | | | | | (ZINC FINGER/DNA) |
| 289 | 1mey | C | 1414 | 1495 | 1.2e−48 | 0.50 | 1.00 | | DNA; CHAIN: A, B, D, E; | COMPLEX (ZINC FINGER/DNA) ZINC |
| | | | | | | | | | CONSENSUS ZINC FINGER | FINGER, PROTEIN-DNA |
| | | | | | | | | | PROTEIN; CHAIN: C, F, G; | INTERACTION, PROTEIN DESIGN, 2 |
| | | | | | | | | | | CRYSTAL STRUCTURE, COMPLEX |
| | | | | | | | | | | (ZINC FINGER/DNA) |
| 289 | 1mey | C | 1414 | 1496 | 1.4e−49 | | | 103.44 | DNA; CHAIN: A, B, D, E; | COMPLEX (ZINC FINGER/DNA) ZINC |
| | | | | | | | | | CONSENSUS ZINC FINGER | FINGER, PROTEIN-DNA |
| | | | | | | | | | PROTEIN; CHAIN: C, F, G; | INTERACTION, PROTEIN DESIGN, 2 |
| | | | | | | | | | | CRYSTAL STRUCTURE, COMPLEX |
| | | | | | | | | | | (ZINC FINGER/DNA) |
| 289 | 1mey | C | 1442 | 1523 | 1.4e−49 | 0.38 | 1.00 | | DNA; CHAIN: A, B, D, E; | COMPLEX (ZINC FINGER/DNA) ZINC |
| | | | | | | | | | CONSENSUS ZINC FINGER | FINGER, PROTEIN-DNA |
| | | | | | | | | | PROTEIN; CHAIN: C, F, G; | INTERACTION, PROTEIN DESIGN, 2 |
| | | | | | | | | | | CRYSTAL STRUCTURE, COMPLEX |
| | | | | | | | | | | (ZINC FINGER/DNA) |
| 289 | 1mey | C | 1470 | 1551 | 1e−49 | 0.31 | 1.00 | | DNA; CHAIN: A, B, D, E; | COMPLEX (ZINC FINGER/DNA) ZINC |
| | | | | | | | | | CONSENSUS ZINC FINGER | FINGER, PROTEIN-DNA |
| | | | | | | | | | PROTEIN; CHAIN: C, F, G; | INTERACTION, PROTEIN DESIGN, 2 |
| | | | | | | | | | | CRYSTAL STRUCTURE, COMPLEX |
| | | | | | | | | | | (ZINC FINGER/DNA) |
| 289 | 1mey | C | 1498 | 1579 | 1.7e−49 | 0.13 | 1.00 | | DNA; CHAIN: A, B, D, E; | COMPLEX (ZINC FINGER/DNA) ZINC |
| | | | | | | | | | CONSENSUS ZINC FINGER | FINGER, PROTEIN-DNA |
| | | | | | | | | | PROTEIN; CHAIN: C, F, G; | INTERACTION, PROTEIN DESIGN, 2 |
| | | | | | | | | | | CRYSTAL STRUCTURE, COMPLEX |
| | | | | | | | | | | (ZINC FINGER/DNA) |
| 289 | 1mey | C | 1526 | 1607 | 3.4e−49 | 0.34 | 1.00 | | DNA; CHAIN: A, B, D, E; | COMPLEX (ZINC FINGER/DNA) ZINC |
| | | | | | | | | | CONSENSUS ZINC FINGER | FINGER, PROTEIN-DNA |
| | | | | | | | | | PROTEIN; CHAIN: C, F, G; | INTERACTION, PROTEIN DESIGN, 2 |
| | | | | | | | | | | CRYSTAL STRUCTURE, COMPLEX |
| | | | | | | | | | | (ZINC FINGER/DNA) |
| 289 | 1mey | C | 1554 | 1635 | 1.7e−49 | 0.26 | 1.00 | | DNA; CHAIN: A, B, D, E; | COMPLEX (ZINC FINGER/DNA) ZINC |
| | | | | | | | | | CONSENSUS ZINC FINGER | FINGER, PROTEIN-DNA |
| | | | | | | | | | PROTEIN; CHAIN: C, F, G; | INTERACTION, PROTEIN DESIGN, 2 |
| | | | | | | | | | | CRYSTAL STRUCTURE, COMPLEX |
| | | | | | | | | | | (ZINC FINGER/DNA) |
| 289 | 1mey | C | 1582 | 1663 | 1.7e−48 | 0.09 | 1.00 | | DNA; CHAIN: A, B, D, E; | COMPLEX (ZINC FINGER/DNA) ZINC |
| | | | | | | | | | CONSENSUS ZINC FINGER | FINGER, PROTEIN-DNA |
| | | | | | | | | | PROTEIN; CHAIN: C, F, G; | INTERACTION, PROTEIN DESIGN, 2 |
| | | | | | | | | | | CRYSTAL STRUCTURE, COMPLEX |
| | | | | | | | | | | (ZINC FINGER/DNA) |
| 289 | 1mey | C | 1610 | 1686 | 1.7e−44 | 0.28 | 0.99 | | DNA; CHAIN: A, B, D, E; | COMPLEX (ZINC FINGER/DNA) ZINC |
| | | | | | | | | | CONSENSUS ZINC FINGER | FINGER, PROTEIN-DNA |
| | | | | | | | | | PROTEIN; CHAIN: C, F, G; | INTERACTION, PROTEIN DESIGN, 2 |
| | | | | | | | | | | CRYSTAL STRUCTURE, COMPLEX |
| | | | | | | | | | | (ZINC FINGER/DNA) |
| 289 | 1mey | C | 1666 | 1742 | 8.5e−44 | 0.52 | 1.00 | | DNA; CHAIN: A, B, D, E; | COMPLEX (ZINC FINGER/DNA) ZINC |
| | | | | | | | | | CONSENSUS ZINC FINGER | FINGER, PROTEIN-DNA |
| | | | | | | | | | PROTEIN; CHAIN: C, F, G; | INTERACTION, PROTEIN DESIGN, 2 |
| | | | | | | | | | | CRYSTAL STRUCTURE, COMPLEX |
| | | | | | | | | | | (ZINC FINGER/DNA) |
| 289 | 1mey | C | 1689 | 1770 | 5.1e−49 | 0.41 | 1.00 | | DNA; CHAIN: A, B, D, E; | COMPLEX (ZINC FINGER/DNA) ZINC |
| | | | | | | | | | CONSENSUS ZINC FINGER | FINGER, PROTEIN-DNA |
| | | | | | | | | | PROTEIN; CHAIN: C, F, G; | INTERACTION, PROTEIN DESIGN, 2 |
| | | | | | | | | | | CRYSTAL STRUCTURE, COMPLEX |
| | | | | | | | | | | (ZINC FINGER/DNA) |
| 289 | 1mey | C | 1717 | 1798 | 1.4e−49 | 0.03 | 0.98 | | DNA; CHAIN: A, B, D, E; | COMPLEX (ZINC FINGER/DNA) ZINC |
| | | | | | | | | | CONSENSUS ZINC FINGER | FINGER, PROTEIN-DNA |
| | | | | | | | | | PROTEIN; CHAIN: C, F, G; | INTERACTION, PROTEIN DESIGN, 2 |
| | | | | | | | | | | CRYSTAL STRUCTURE, COMPLEX |
| | | | | | | | | | | (ZINC FINGER/DNA) |
| 289 | 1mey | C | 1745 | 1822 | 3.4e−45 | −0.22 | 0.12 | | DNA; CHAIN: A, B, D, E; | COMPLEX (ZINC FINGER/DNA) ZINC |
| | | | | | | | | | CONSENSUS ZINC FINGER | FINGER, PROTEIN-DNA |
| | | | | | | | | | PROTEIN; CHAIN: C, F, G; | INTERACTION, PROTEIN DESIGN, 2 |
| | | | | | | | | | | CRYSTAL STRUCTURE, COMPLEX |
| | | | | | | | | | | (ZINC FINGER/DNA) |
| 289 | 1mey | C | 1825 | 1906 | 1e−49 | −0.28 | 0.48 | | DNA; CHAIN: A, B, D, E; | COMPLEX (ZINC FINGER/DNA) ZINC |
| | | | | | | | | | CONSENSUS ZINC FINGER | FINGER, PROTEIN-DNA |
| | | | | | | | | | PROTEIN; CHAIN: C, F, G; | INTERACTION, PROTEIN DESIGN, 2 |
| | | | | | | | | | | CRYSTAL STRUCTURE, COMPLEX |
| | | | | | | | | | | (ZINC FINGER/DNA) |
| 289 | 1mey | C | 1853 | 1934 | 1e−49 | −0.20 | 0.78 | | DNA; CHAIN: A, B, D, E; | COMPLEX (ZINC FINGER/DNA) ZINC |
| | | | | | | | | | CONSENSUS ZINC FINGER | FINGER, PROTEIN-DNA |
| | | | | | | | | | PROTEIN; CHAIN: C, F, G; | INTERACTION, PROTEIN DESIGN, 2 |
| | | | | | | | | | | CRYSTAL STRUCTURE, COMPLEX |
| | | | | | | | | | | (ZINC FINGER/DNA) |
| 289 | 1mey | C | 1881 | 1938 | 1.7e−33 | 0.35 | 0.58 | | DNA; CHAIN: A, B, D, E; | COMPLEX (ZINC FINGER/DNA) ZINC |
| | | | | | | | | | CONSENSUS ZINC FINGER | FINGER, PROTEIN-DNA |
| | | | | | | | | | PROTEIN; CHAIN: C, F, G; | INTERACTION, PROTEIN DESIGN, 2 |
| | | | | | | | | | | CRYSTAL STRUCTURE, COMPLEX |
| | | | | | | | | | | (ZINC FINGER/DNA) |
| 289 | 1mey | C | 558 | 639 | 3.4e−44 | −0.04 | 0.55 | | DNA; CHAIN: A, B, D, E; | COMPLEX (ZINC FINGER/DNA) ZINC |
| | | | | | | | | | CONSENSUS ZINC FINGER | FINGER, PROTEIN-DNA |
| | | | | | | | | | PROTEIN; CHAIN: C, F, G; | INTERACTION, PROTEIN DESIGN, 2 |
| | | | | | | | | | | CRYSTAL STRUCTURE, COMPLEX |
| | | | | | | | | | | (ZINC FINGER/DNA) |
| 289 | 1mey | C | 586 | 667 | 3.4e−46 | −0.05 | 0.82 | | DNA; CHAIN: A, B, D, E; | COMPLEX (ZINC FINGER/DNA) ZINC |
| | | | | | | | | | CONSENSUS ZINC FINGER | FINGER, PROTEIN-DNA |
| | | | | | | | | | PROTEIN; CHAIN: C, F, G; | INTERACTION, PROTEIN DESIGN, 2 |
| | | | | | | | | | | CRYSTAL STRUCTURE, COMPLEX |
| | | | | | | | | | | (ZINC FINGER/DNA) |
| 289 | 1mey | C | 614 | 695 | 1.4e−47 | 0.23 | 1.00 | | DNA; CHAIN: A, B, D, E; | COMPLEX (ZINC FINGER/DNA) ZINC |
| | | | | | | | | | CONSENSUS ZINC FINGER | FINGER, PROTEIN-DNA |
| | | | | | | | | | PROTEIN; CHAIN: C, F, G; | INTERACTION, PROTEIN DESIGN, 2 |
| | | | | | | | | | | CRYSTAL STRUCTURE, COMPLEX |
| | | | | | | | | | | (ZINC FINGER/DNA) |
| 289 | 1mey | C | 642 | 723 | 8.5e−49 | 0.03 | 1.00 | | DNA; CHAIN: A, B, D, E; | COMPLEX (ZINC FINGER/DNA) ZINC |
| | | | | | | | | | CONSENSUS ZINC FINGER | FINGER, PROTEIN-DNA |
| | | | | | | | | | PROTEIN; CHAIN: C, F, G; | INTERACTION, PROTEIN DESIGN, 2 |
| | | | | | | | | | | CRYSTAL STRUCTURE, COMPLEX |
| | | | | | | | | | | (ZINC FINGER/DNA) |
| 289 | 1mey | C | 698 | 779 | 1e−49 | 0.11 | 0.98 | | DNA; CHAIN: A, B, D, E; | COMPLEX (ZINC FINGER/DNA) ZINC |
| | | | | | | | | | CONSENSUS ZINC FINGER | FINGER, PROTEIN-DNA |
| | | | | | | | | | PROTEIN; CHAIN: C, F, G; | INTERACTION, PROTEIN DESIGN, 2 |
| | | | | | | | | | | CRYSTAL STRUCTURE, COMPLEX |
| | | | | | | | | | | (ZINC FINGER/DNA) |
| 289 | 1mey | C | 726 | 807 | 6.8e−50 | 0.19 | 1.00 | | DNA; CHAIN: A, B, D, E; | COMPLEX (ZINC FINGER/DNA) ZINC |
| | | | | | | | | | CONSENSUS ZINC FINGER | FINGER, PROTEIN-DNA |
| | | | | | | | | | PROTEIN; CHAIN: C, F, G; | INTERACTION, PROTEIN DESIGN, 2 |
| | | | | | | | | | | CRYSTAL STRUCTURE, COMPLEX |
| | | | | | | | | | | (ZINC FINGER/DNA) |
| 289 | 1mey | C | 754 | 835 | 6.8e−50 | 0.05 | 1.00 | | DNA; CHAIN: A, B, D, E; | COMPLEX (ZINC FINGER/DNA) ZINC |
| | | | | | | | | | CONSENSUS ZINC FINGER | FINGER, PROTEIN-DNA |
| | | | | | | | | | PROTEIN; CHAIN: C, F, G; | INTERACTION, PROTEIN DESIGN, 2 |
| | | | | | | | | | | CRYSTAL STRUCTURE, COMPLEX |
| | | | | | | | | | | (ZINC FINGER/DNA) |
| 289 | 1mey | C | 782 | 863 | 1e−49 | 0.34 | 1.00 | | DNA; CHAIN: A, B, D, E; | COMPLEX (ZINC FINGER/DNA) ZINC |
| | | | | | | | | | CONSENSUS ZINC FINGER | FINGER, PROTEIN-DNA |
| | | | | | | | | | PROTEIN; CHAIN: C, F, G; | INTERACTION, PROTEIN DESIGN, 2 |
| | | | | | | | | | | CRYSTAL STRUCTURE, COMPLEX |
| | | | | | | | | | | (ZINC FINGER/DNA) |
| 289 | 1mey | C | 810 | 891 | 3.4e−49 | 0.32 | 1.00 | | DNA; CHAIN: A, B, D, E; | COMPLEX (ZINC FINGER/DNA) ZINC |
| | | | | | | | | | CONSENSUS ZINC FINGER | FINGER, PROTEIN-DNA |
| | | | | | | | | | PROTEIN; CHAIN: C, F, G; | INTERACTION, PROTEIN DESIGN, 2 |
| | | | | | | | | | | CRYSTAL STRUCTURE, COMPLEX |
| | | | | | | | | | | (ZINC FINGER/DNA) |
| 289 | 1mey | C | 838 | 935 | 3.4e−44 | 0.04 | 1.00 | | DNA; CHAIN: A, B, D, E; | COMPLEX (ZINC FINGER/DNA) ZINC |
| | | | | | | | | | CONSENSUS ZINC FINGER | FINGER, PROTEIN-DNA |
| | | | | | | | | | PROTEIN; CHAIN: C, F, G; | INTERACTION, PROTEIN DESIGN, 2 |
| | | | | | | | | | | CRYSTAL STRUCTURE, COMPLEX |
| | | | | | | | | | | (ZINC FINGER/DNA) |
| 289 | 1mey | C | 866 | 963 | 8.5e−41 | 0.03 | 0.98 | | DNA; CHAIN: A, B, D, E; | COMPLEX (ZINC FINGER/DNA) ZINC |
| | | | | | | | | | CONSENSUS ZINC FINGER | FINGER, PROTEIN-DNA |
| | | | | | | | | | PROTEIN; CHAIN: C, F, G; | INTERACTION, PROTEIN DESIGN, 2 |
| | | | | | | | | | | CRYSTAL STRUCTURE, COMPLEX |
| | | | | | | | | | | (ZINC FINGER/DNA) |
| 289 | 1mey | C | 910 | 991 | 3.4e−42 | 0.16 | 1.00 | | DNA; CHAIN: A, B, D, E; | COMPLEX (ZINC FINGER/DNA) ZINC |
| | | | | | | | | | CONSENSUS ZINC FINGER | FINGER, PROTEIN-DNA |
| | | | | | | | | | PROTEIN; CHAIN: C, F, G; | INTERACTION, PROTEIN DESIGN, 2 |
| | | | | | | | | | | CRYSTAL STRUCTURE, COMPLEX |
| | | | | | | | | | | (ZINC FINGER/DNA) |
| 289 | 1mey | C | 994 | 1075 | 1.4e−39 | 0.59 | 1.00 | | DNA; CHAIN: A, B, D, E; | COMPLEX (ZINC FINGER/DNA) ZINC |
| | | | | | | | | | CONSENSUS ZINC FINGER | FINGER, PROTEIN-DNA |
| | | | | | | | | | PROTEIN; CHAIN: C, F, G; | INTERACTION, PROTEIN DESIGN, 2 |
| | | | | | | | | | | CRYSTAL STRUCTURE, COMPLEX |
| | | | | | | | | | | (ZINC FINGER/DNA) |
| 289 | 1mey | G | 908 | 935 | 1.5e−10 | 0.46 | 0.94 | | DNA; CHAIN: A, B, D, E; | COMPLEX (ZINC FINGER/DNA) ZINC |
| | | | | | | | | | CONSENSUS ZINC FINGER | FINGER, PROTEIN-DNA |
| | | | | | | | | | PROTEIN; CHAIN: C, F, G; | INTERACTION, PROTEIN DESIGN, 2 |
| | | | | | | | | | | CRYSTAL STRUCTURE, COMPLEX |
| | | | | | | | | | | (ZINC FINGER/DNA) |
| 289 | 1tf6 | A | 1051 | 1196 | 1.2e−33 | 0.18 | 0.86 | | TFIIIA; CHAIN: A, D; 5S | COMPLEX (TRANSCRIPTION |
| | | | | | | | | | RIBOSOMAL RNA GENE; CHAIN: | REGULATION/DNA) COMPLEX |
| | | | | | | | | | B, C, E, F; | (TRANSCRIPTION |
| | | | | | | | | | | REGULATION/DNA), RNA |
| | | | | | | | | | | POLYMERASE III, 2 TRANSCRIPTION |
| | | | | | | | | | | INITIATION, ZINC FINGER PROTEIN |
| 289 | 1tf6 | A | 1106 | 1272 | 1.7e−36 | | | 113.59 | TFIIIA; CHAIN: A, D; 5S | COMPLEX (TRANSCRIPTION |
| | | | | | | | | | RIBOSOMAL RNA GENE; CHAIN: | REGULATION/DNA) COMPLEX |
| | | | | | | | | | B, C, E, F; | (TRANSCRIPTION |
| | | | | | | | | | | REGULATION/DNA), RNA |
| | | | | | | | | | | POLYMERASE III, 2 TRANSCRIPTION |
| | | | | | | | | | | INITIATION, ZINC FINGER PROTEIN |
| 289 | 1tf6 | A | 1163 | 1308 | 1.7e−36 | −0.10 | 0.86 | | TFIIIA; CHAIN: A, D; 5S | COMPLEX (TRANSCRIPTION |
| | | | | | | | | | RIBOSOMAL RNA GENE; CHAIN: | REGULATION/DNA) COMPLEX |
| | | | | | | | | | B, C, E, F; | (TRANSCRIPTION |
| | | | | | | | | | | REGULATION/DNA), RNA |
| | | | | | | | | | | POLYMERASE III, 2 TRANSCRIPTION |
| | | | | | | | | | | INITIATION, ZINC FINGER PROTEIN |
| 289 | 1tf6 | A | 1275 | 1420 | 6.8e−37 | 0.07 | 0.99 | | TFIIIA; CHAIN: A, D; 5S | COMPLEX (TRANSCRIPTION |
| | | | | | | | | | RIBOSOMAL RNA GENE; CHAIN: | REGULATION/DNA) COMPLEX |
| | | | | | | | | | B, C, E, F; | (TRANSCRIPTION |
| | | | | | | | | | | REGULATION/DNA), RNA |
| | | | | | | | | | | POLYMERASE III, 2 TRANSCRIPTION |
| | | | | | | | | | | INITIATION, ZINC FINGER PROTEIN |
| 289 | 1tf6 | A | 1387 | 1532 | 1.4e−36 | 0.39 | 0.90 | | TFIIIA; CHAIN: A, D; 5S | COMPLEX (TRANSCRIPTION |
| | | | | | | | | | RIBOSOMAL RNA GENE; CHAIN: | REGULATION/DNA) COMPLEX |
| | | | | | | | | | B, C, E, F; | (TRANSCRIPTION |
| | | | | | | | | | | REGULATION/DNA), RNA |
| | | | | | | | | | | POLYMERASE III, 2 TRANSCRIPTION |
| | | | | | | | | | | INITIATION, ZINC FINGER PROTEIN |
| 289 | 1tf6 | A | 1443 | 1588 | 3.4e−37 | 0.20 | 0.76 | | TFIIIA; CHAIN: A, D; 5S | COMPLEX (TRANSCRIPTION |
| | | | | | | | | | RIBOSOMAL RNA GENE; CHAIN: | REGULATION/DNA) COMPLEX |
| | | | | | | | | | B, C, E, F; | (TRANSCRIPTION |
| | | | | | | | | | | REGULATION/DNA), RNA |
| | | | | | | | | | | POLYMERASE III, 2 TRANSCRIPTION |
| | | | | | | | | | | INITIATION, ZINC FINGER PROTEIN |
| 289 | 1tf6 | A | 1555 | 1695 | 1.2e−33 | −0.13 | 0.64 | | TFIIIA; CHAIN: A, D; 5S | COMPLEX (TRANSCRIPTION |
| | | | | | | | | | RIBOSOMAL RNA GENE; CHAIN: | REGULATION/DNA) COMPLEX |
| | | | | | | | | | B, C, E, F; | (TRANSCRIPTION |
| | | | | | | | | | | REGULATION/DNA), RNA |
| | | | | | | | | | | POLYMERASE III, 2 TRANSCRIPTION |
| | | | | | | | | | | INITIATION, ZINC FINGER PROTEIN |
| 289 | 1tf6 | A | 1667 | 1808 | 1e−33 | −0.29 | 0.25 | | TFIIIA; CHAIN: A, D; 5S | COMPLEX (TRANSCRIPTION |
| | | | | | | | | | RIBOSOMAL RNA GENE; CHAIN: | REGULATION/DNA) COMPLEX |
| | | | | | | | | | B, C, E, F; | (TRANSCRIPTION |
| | | | | | | | | | | REGULATION/DNA), RNA |
| | | | | | | | | | | POLYMERASE III, 2 TRANSCRIPTION |
| | | | | | | | | | | INITIATION, ZINC FINGER PROTEIN |
| 289 | 1tf6 | A | 532 | 676 | 1.7e−30 | 0.04 | 0.17 | | TFIIIA; CHAIN: A, D; 5S | COMPLEX (TRANSCRIPTION |
| | | | | | | | | | RIBOSOMAL RNA GENE; CHAIN: | REGULATION/DNA) COMPLEX |
| | | | | | | | | | B, C, E, F; | (TRANSCRIPTION |
| | | | | | | | | | | REGULATION/DNA), RNA |
| | | | | | | | | | | POLYMERASE III, 2 TRANSCRIPTION |
| | | | | | | | | | | INITIATION, ZINC FINGER PROTEIN |
| 289 | 1tf6 | A | 643 | 788 | 3.4e−36 | 0.06 | 0.95 | | TFIIIA; CHAIN: A, D; 5S | COMPLEX (TRANSCRIPTION |
| | | | | | | | | | RIBOSOMAL RNA GENE; CHAIN: | REGULATION/DNA) COMPLEX |
| | | | | | | | | | B, C, E, F; | (TRANSCRIPTION |
| | | | | | | | | | | REGULATION/DNA), RNA |
| | | | | | | | | | | POLYMERASE III, 2 TRANSCRIPTION |
| | | | | | | | | | | INITIATION, ZINC FINGER PROTEIN |
| 289 | 1tf6 | A | 699 | 849 | 6.8e−38 | −0.10 | 0.94 | | TFIIIA; CHAIN: A, D; 5S | COMPLEX (TRANSCRIPTION |
| | | | | | | | | | RIBOSOMAL RNA GENE; CHAIN: | REGULATION/DNA) COMPLEX |
| | | | | | | | | | B, C, E, F; | (TRANSCRIPTION |
| | | | | | | | | | | REGULATION/DNA), RNA |
| | | | | | | | | | | POLYMERASE III, 2 TRANSCRIPTION |
| | | | | | | | | | | INITIATION, ZINC FINGER PROTEIN |
| 289 | 1tf6 | A | 811 | 951 | 3.4e−30 | 0.05 | 0.87 | | TFIIIA; CHAIN: A, D; 5S | COMPLEX (TRANSCRIPTION |
| | | | | | | | | | RIBOSOMAL RNA GENE; CHAIN: | REGULATION/DNA) COMPLEX |
| | | | | | | | | | B, C, E, F; | (TRANSCRIPTION |
| | | | | | | | | | | REGULATION/DNA), RNA |
| | | | | | | | | | | POLYMERASE III, 2 TRANSCRIPTION |
| | | | | | | | | | | INITIATION, ZINC FINGER PROTEIN |
| 289 | 1tf6 | A | 867 | 1033 | 6.8e−31 | −0.12 | 0.42 | | TFIIIA; CHAIN: A, D; 5S | COMPLEX (TRANSCRIPTION |
| | | | | | | | | | RIBOSOMAL RNA GENE; CHAIN: | REGULATION/DNA) COMPLEX |
| | | | | | | | | | B, C, E, F; | (TRANSCRIPTION |
| | | | | | | | | | | REGULATION/DNA), RNA |
| | | | | | | | | | | POLYMERASE III, 2 TRANSCRIPTION |
| | | | | | | | | | | INITIATION, ZINC FINGER PROTEIN |
| 289 | 1ubd | C | 1020 | 1131 | 1.5e−54 | 0.04 | 0.94 | | YY1; CHAIN: C; ADENO- | COMPLEX (TRANSCRIPTION |
| | | | | | | | | | ASSOCIATED VIRUS P5 | REGULATION/DNA) YING-YANG 1; |
| | | | | | | | | | INITIATOR ELEMENT DNA; | TRANSCRIPTION INITIATION, |
| | | | | | | | | | CHAIN: A, B; | INITIATOR ELEMENT, YY1, ZINC 2 |
| | | | | | | | | | | FINGER PROTEIN, DNA-PROTEIN |
| | | | | | | | | | | RECOGNITION, 3 COMPLEX |
| | | | | | | | | | | (TRANSCRIPTION |
| | | | | | | | | | | REGULATION/DNA) |
| 289 | 1ubd | C | 1077 | 1187 | 1e−55 | 0.05 | 0.94 | | YY1; CHAIN: C; ADENO- | COMPLEX (TRANSCRIPTION |
| | | | | | | | | | ASSOCIATED VIRUS P5 | REGULATION/DNA) YING-YANG 1; |
| | | | | | | | | | INITIATOR ELEMENT DNA; | TRANSCRIPTION INITIATION, |
| | | | | | | | | | CHAIN: A, B; | INITIATOR ELEMENT, YY1, ZINC 2 |
| | | | | | | | | | | FINGER PROTEIN, DNA-PROTEIN |
| | | | | | | | | | | RECOGNITION, 3 COMPLEX |
| | | | | | | | | | | (TRANSCRIPTION |
| | | | | | | | | | | REGULATION/DNA) |
| 289 | 1ubd | C | 1104 | 1244 | 3e−53 | −0.46 | 0.93 | | YY1; CHAIN: C; ADENO- | COMPLEX (TRANSCRIPTION |
| | | | | | | | | | ASSOCIATED VIRUS P5 | REGULATION/DNA) YING-YANG 1; |
| | | | | | | | | | INITIATOR ELEMENT DNA; | TRANSCRIPTION INITIATION, |
| | | | | | | | | | CHAIN: A, B; | INITIATOR ELEMENT, YY1, ZINC 2 |
| | | | | | | | | | | FINGER PROTEIN, DNA-PROTEIN |
| | | | | | | | | | | RECOGNITION, 3 COMPLEX |
| | | | | | | | | | | (TRANSCRIPTION |
| | | | | | | | | | | REGULATION/DNA) |
| 289 | 1ubd | C | 1160 | 1271 | 1.5e−52 | 0.00 | 0.72 | | YY1; CHAIN: C; ADENO- | COMPLEX (TRANSCRIPTION |
| | | | | | | | | | ASSOCIATED VIRUS P5 | REGULATION/DNA) YING-YANG 1; |
| | | | | | | | | | INITIATOR ELEMENT DNA; | TRANSCRIPTION INITIATION, |
| | | | | | | | | | CHAIN: A, B; | INITIATOR ELEMENT, YY1, ZINC 2 |
| | | | | | | | | | | FINGER PROTEIN, DNA-PROTEIN |
| | | | | | | | | | | RECOGNITION, 3 COMPLEX |
| | | | | | | | | | | (TRANSCRIPTION |
| | | | | | | | | | | REGULATION/DNA) |
| 289 | 1ubd | C | 1198 | 1299 | 3.4e−34 | 0.18 | 0.58 | | YY1; CHAIN: C; ADENO- | COMPLEX (TRANSCRIPTION |
| | | | | | | | | | ASSOCIATED VIRUS P5 | REGULATION/DNA) YING-YANG 1; |
| | | | | | | | | | INITIATOR ELEMENT DNA; | TRANSCRIPTION INITIATION, |
| | | | | | | | | | CHAIN: A, B; | INITIATOR ELEMENT, YY1, ZINC 2 |
| | | | | | | | | | | FINGER PROTEIN, DNA-PROTEIN |
| | | | | | | | | | | RECOGNITION, 3 COMPLEX |
| | | | | | | | | | | (TRANSCRIPTION |
| | | | | | | | | | | REGULATION/DNA) |
| 289 | 1ubd | C | 1216 | 1327 | 6e−52 | 0.06 | 0.89 | | YY1; CHAIN: C; ADENO- | COMPLEX (TRANSCRIPTION |
| | | | | | | | | | ASSOCIATED VIRUS P5 | REGULATION/DNA) YING-YANG 1; |
| | | | | | | | | | INITIATOR ELEMENT DNA; | TRANSCRIPTION INITIATION, |
| | | | | | | | | | CHAIN: A, B; | INITIATOR ELEMENT, YY1, ZINC 2 |
| | | | | | | | | | | FINGER PROTEIN, DNA-PROTEIN |
| | | | | | | | | | | RECOGNITION, 3 COMPLEX |
| | | | | | | | | | | (TRANSCRIPTION |
| | | | | | | | | | | REGULATION/DNA) |
| 289 | 1ubd | C | 1226 | 1327 | 1.4e−34 | 0.30 | 0.98 | | YY1; CHAIN: C; ADENO- | COMPLEX (TRANSCRIPTION |
| | | | | | | | | | ASSOCIATED VIRUS P5 | REGULATION/DNA) YING-YANG 1; |
| | | | | | | | | | INITIATOR ELEMENT DNA; | TRANSCRIPTION INITIATION, |
| | | | | | | | | | CHAIN: A, B; | INITIATOR ELEMENI, YY1, ZINC 2 |
| | | | | | | | | | | FINGER PROTEIN, DNA-PROTEIN |
| | | | | | | | | | | RECOGNITION, 3 COMPLEX |
| | | | | | | | | | | (TRANSCRIPTION |
| | | | | | | | | | | REGULATION/DNA) |
| 289 | 1ubd | C | 1245 | 1356 | 1.2e−52 | 0.33 | 0.99 | | YY1; CHAIN: C; ADENO- | COMPLEX (TRANSCRIPTION |
| | | | | | | | | | ASSOCIATED VIRUS P5 | REGULATION/DNA) YING-YANG 1; |
| | | | | | | | | | INITIATOR ELEMENT DNA; | TRANSCRIPTION INITIATION, |
| | | | | | | | | | CHAIN: A, B; | INITIATOR ELEMENT, YY1, ZINC 2 |
| | | | | | | | | | | FINGER PROTEIN, DNA-PROTEIN |
| | | | | | | | | | | RECOGNITION, 3 COMPLEX |
| | | | | | | | | | | (TRANSCRIPTION |
| | | | | | | | | | | REGULATION/DNA) |
| 289 | 1ubd | C | 1272 | 1383 | 7.5e−50 | 0.01 | 0.78 | | YY1; CHAIN: C; ADENO- | COMPLEX (TRANSCRIPTION |
| | | | | | | | | | ASSOCIATED VIRUS P5 | REGULATION/DNA) YING-YANG 1; |
| | | | | | | | | | INITIATOR ELEMENT DNA; | TRANSCRIPTION INITIATION, |
| | | | | | | | | | CHAIN: A, B; | INITIATOR ELEMENT, YY1, ZINC 2 |
| | | | | | | | | | | FINGER PROTEIN, DNA-PROTEIN |
| | | | | | | | | | | RECOGNITION, 3 COMPLEX |
| | | | | | | | | | | (TRANSCRIPTION |
| | | | | | | | | | | REGULATION/DNA) |
| 289 | 1ubd | C | 1328 | 1439 | 3e−50 | 0.26 | 0.86 | | YY1; CHAIN: C; ADENO- | COMPLEX (TRANSCRIPTION |
| | | | | | | | | | ASSOCIATED VIRUS P5 | REGULATION/DNA) YING-YANG 1; |
| | | | | | | | | | INITIATOR ELEMENT DNA; | TRANSCRIPTION INITIATION, |
| | | | | | | | | | CHAIN: A, B; | INITIATOR ELEMENT, YY1, ZINC 2 |
| | | | | | | | | | | FINGER PROTEIN, DNA-PROTEIN |
| | | | | | | | | | | RECOGNITION, 3 COMPLEX |
| | | | | | | | | | | (TRANSCRIPTION |
| | | | | | | | | | | REGULATION/DNA) |
| 289 | 1ubd | C | 1384 | 1496 | 4.5e−52 | 0.11 | 0.93 | | YY1; CHAIN: C; ADENO- | COMPLEX (TRANSCRIPTION |
| | | | | | | | | | ASSOCIATED VIRUS P5 | REGULATION/DNA) YING-YANG 1; |
| | | | | | | | | | INITIATOR ELEMENT DNA; | TRANSCRIPTION INITIATION, |
| | | | | | | | | | CHAIN: A, B; | INITIATOR ELEMENT, YY1, ZINC 2 |
| | | | | | | | | | | FINGER PROTEIN, DNA-PROTEIN |
| | | | | | | | | | | RECOGNITION, 3 COMPLEX |
| | | | | | | | | | | (TRANSCRIPTION |
| | | | | | | | | | | REGULATION/DNA) |
| 289 | 1ubd | C | 1469 | 1579 | 4.5e−55 | 0.03 | 1.00 | | YY1; CHAIN: C; ADENO- | COMPLEX (TRANSCRIPTION |
| | | | | | | | | | ASSOCIATED VIRUS P5 | REGULATION/DNA) YING-YANG 1; |
| | | | | | | | | | INITIATOR ELEMENT DNA; | TRANSCRIPTION INITIATION, |
| | | | | | | | | | CHAIN: A, B; | INITIATOR ELEMENT, YY1, ZINC 2 |
| | | | | | | | | | | FINGER PROTEIN, DNA-PROTEIN |
| | | | | | | | | | | RECOGNITION, 3 COMPLEX |
| | | | | | | | | | | (TRANSCRIPTION |
| | | | | | | | | | | REGULATION/DNA) |
| 289 | 1ubd | C | 1506 | 1607 | 3.4e−34 | 0.09 | 1.00 | | YY1; CHAIN: C; ADENO- | COMPLEX (TRANSCRIPTION |
| | | | | | | | | | ASSOCIATED VIRUS P5 | REGULATION/DNA) YING-YANG 1; |
| | | | | | | | | | INITIATOR ELEMENT DNA; | TRANSCRIPTION INITIATION, |
| | | | | | | | | | CHAIN: A, B; | INITIATOR ELEMENT, YY1, ZINC 2 |
| | | | | | | | | | | FINGER PROTEIN, DNA-PROTEIN |
| | | | | | | | | | | RECOGNITION, 3 COMPLEX |
| | | | | | | | | | | (TRANSCRIPTION |
| | | | | | | | | | | REGULATION/DNA) |
| 289 | 1ubd | C | 1524 | 1635 | 4.5e−49 | −0.29 | 0.99 | | YY1; CHAIN: C; ADENO- | COMPLEX (TRANSCRIPTION |
| | | | | | | | | | ASSOCIATED VIRUS P5 | REGULATION/DNA) YING-YANG 1; |
| | | | | | | | | | INITIATOR ELEMENT DNA; | TRANSCRIPTION INITIATION, |
| | | | | | | | | | CHAIN: A, B; | INITIATOR ELEMENT, YY1, ZINC 2 |
| | | | | | | | | | | FINGER PROTEIN, DNA-PROTEIN |
| | | | | | | | | | | RECOGNITION, 3 COMPLEX |
| | | | | | | | | | | (TRANSCRIPTION |
| | | | | | | | | | | REGULATION/DNA) |
| 289 | 1ubd | C | 1562 | 1663 | 1e−32 | 0.04 | 0.94 | | YY1; CHAIN: C; ADENO- | COMPLEX (TRANSCRIPTION |
| | | | | | | | | | ASSOCIATED VIRUS P5 | REGULATION/DNA) YING-YANG 1; |
| | | | | | | | | | INITIATOR ELEMENT DNA; | TRANSCRIPTION INITIATION, |
| | | | | | | | | | CHAIN: A, B; | INITIATOR ELEMENT, YY1, ZINC 2 |
| | | | | | | | | | | FINGER PROTEIN, DNA-PROTEIN |
| | | | | | | | | | | RECOGNITION, 3 COMPLEX |
| | | | | | | | | | | (TRANSCRIPTION |
| | | | | | | | | | | REGULATION/DNA) |
| 289 | 1ubd | C | 1608 | 1714 | 6e−52 | 0.12 | 0.31 | | YY1; CHAIN: C; ADENO- | COMPLEX (TRANSCRIPTION |
| | | | | | | | | | ASSOCIATED VIRUS P5 | REGULATION/DNA) YING-YANG 1; |
| | | | | | | | | | INITIATOR ELEMENT DNA; | TRANSCRIPTION INITIATION, |
| | | | | | | | | | CHAIN: A, B; | INITIATOR ELEMENT, YY1, ZINC 2 |
| | | | | | | | | | | FINGER PROTEIN, DNA-PROTEIN |
| | | | | | | | | | | RECOGNITION, 3 COMPLEX |
| | | | | | | | | | | (TRANSCRIPTION |
| | | | | | | | | | | REGULATION/DNA) |
| 289 | 1ubd | C | 1618 | 1714 | 3.4e−30 | −0.01 | 0.49 | | YY1; CHAIN: C; ADENO- | COMPLEX (TRANSCRIPTION |
| | | | | | | | | | ASSOCIATED VIRUS P5 | REGULATION/DNA) YING-YANG 1; |
| | | | | | | | | | INITIATOR ELEMENT DNA; | TRANSCRIPTION INITIATION, |
| | | | | | | | | | CHAIN: A, B; | INITIATOR ELEMENT, YY1, ZINC 2 |
| | | | | | | | | | | FINGER PROTEIN, DNA-PROTEIN |
| | | | | | | | | | | RECOGNITION, 3 COMPLEX |
| | | | | | | | | | | (TRANSCRIPTION |
| | | | | | | | | | | REGULATION/DNA) |
| 289 | 1ubd | C | 1636 | 1742 | 7.5e−51 | −0.22 | 0.83 | | YY1; CHAIN: C; ADENO- | COMPLEX (TRANSCRIPTION |
| | | | | | | | | | ASSOCIATED VIRUS P5 | REGULATION/DNA) YING-YANG 1; |
| | | | | | | | | | INITIATOR ELEMENT DNA; | TRANSCRIPTION INITIATION, |
| | | | | | | | | | CHAIN: A, B; | INITIATOR ELEMENT, YY1, ZINC 2 |
| | | | | | | | | | | FINGER PROTEIN, DNA-PROTEIN |
| | | | | | | | | | | RECOGNITION, 3 COMPLEX |
| | | | | | | | | | | (TRANSCRIPTION |
| | | | | | | | | | | REGULATION/DNA) |
| 289 | 1ubd | C | 1674 | 1770 | 6.8e−32 | −0.19 | 0.90 | | YY1; CHAIN: C; ADENO- | COMPLEX (TRANSCRIPTION |
| | | | | | | | | | ASSOCIATED VIRUS P5 | REGULATION/DNA) YING-YANG 1; |
| | | | | | | | | | INITIATOR ELEMENT DNA; | TRANSCRIPTION INITIATION, |
| | | | | | | | | | CHAIN: A, B; | INITIATOR ELEMENT, YY1, ZINC 2 |
| | | | | | | | | | | FINGER PROTEIN, DNA-PROTEIN |
| | | | | | | | | | | RECOGNITION, 3 COMPLEX |
| | | | | | | | | | | (TRANSCRIPTION |
| | | | | | | | | | | REGULATION/DNA) |
| 289 | 1ubd | C | 1725 | 1822 | 1.7e−30 | −0.13 | 0.12 | | YY1; CHAIN: C; ADENO- | COMPLEX (TRANSCRIPTION |
| | | | | | | | | | ASSOCIATED VIRUS P5 | REGULATION/DNA) YING-YANG 1; |
| | | | | | | | | | INITIATOR ELEMENT DNA; | TRANSCRIPTION INITIATION, |
| | | | | | | | | | CHAIN: A, B; | INITIATOR ELEMENT, YY1, ZINC 2 |
| | | | | | | | | | | FINGER PROTEIN, DNA-PROTEIN |
| | | | | | | | | | | RECOGNITION, 3 COMPLEX |
| | | | | | | | | | | (TRANSCRIPTION |
| | | | | | | | | | | REGULATION/DNA) |
| 289 | 1ubd | C | 540 | 639 | 6.8e−29 | −0.21 | 0.06 | | YY1; CHAIN: C; ADENO- | COMPLEX (TRANSCRIPTION |
| | | | | | | | | | ASSOCIATED VIRUS P5 | REGULATION/DNA) YING-YANG 1; |
| | | | | | | | | | INITIATOR ELEMENT DNA; | TRANSCRIPTION INITIATION, |
| | | | | | | | | | CHAIN: A, B; | INITIATOR ELEMENT, YY1, ZINC 2 |
| | | | | | | | | | | FINGER PROTEIN, DNA-PROTEIN |
| | | | | | | | | | | RECOGNITION, 3 COMPLEX |
| | | | | | | | | | | (TRANSCRIPTION |
| | | | | | | | | | | REGULATION/DNA) |
| 289 | 1ubd | C | 561 | 667 | 1.5e−31 | 0.20 | 0.41 | | YY1; CHAIN: C; ADENO- | COMPLEX (TRANSCRIPTION |
| | | | | | | | | | ASSOCIATED VIRUS P5 | REGULATION/DNA) YING-YANG 1; |
| | | | | | | | | | INITIATOR ELEMENT DNA; | TRANSCRIPTION INITIATION, |
| | | | | | | | | | CHAIN: A, B; | INITIATOR ELEMENT, YY1, ZINC 2 |
| | | | | | | | | | | FINGER PROTEIN, DNA-PROTEIN |
| | | | | | | | | | | RECOGNITION, 3 COMPLEX |
| | | | | | | | | | | (TRANSCRIPTION |
| | | | | | | | | | | REGULATION/DNA) |
| 289 | 1ubd | C | 584 | 695 | 3e−42 | −0.19 | 0.86 | | YY1; CHAIN: C; ADENO- | COMPLEX (TRANSCRIPTION |
| | | | | | | | | | ASSOCIATED VIRUS P5 | REGULATION/DNA) YING-YANG 1; |
| | | | | | | | | | INITIATOR ELEMENT DNA; | TRANSCRIPTION INITIATION, |
| | | | | | | | | | CHAIN: A, B; | INITIATOR ELEMENT, YY1, ZINC 2 |
| | | | | | | | | | | FINGER PROTEIN, DNA-PROTEIN |
| | | | | | | | | | | RECOGNITION, 3 COMPLEX |
| | | | | | | | | | | (TRANSCRIPTION |
| | | | | | | | | | | REGULATION/DNA) |
| 289 | 1ubd | C | 589 | 695 | 3.4e−32 | −0.17 | 0.86 | | YY1; CHAIN: C; ADENO- | COMPLEX (TRANSCRIPTION |
| | | | | | | | | | ASSOCIATED VIRUS P5 | REGULATION/DNA) YING-YANG 1; |
| | | | | | | | | | INITIATOR ELEMENT DNA; | TRANSCRIPTION INITIATION, |
| | | | | | | | | | CHAIN: A, B; | INITIATOR ELEMENT, YY1, ZINC 2 |
| | | | | | | | | | | FINGER PROTEIN, DNA-PROTEIN |
| | | | | | | | | | | RECOGNITION, 3 COMPLEX |
| | | | | | | | | | | (TRANSCRIPTION |
| | | | | | | | | | | REGULATION/DNA) |
| 289 | 1ubd | C | 619 | 724 | 1.5e−47 | 0.04 | 0.51 | | YY1; CHAIN: C; ADENO- | COMPLEX (TRANSCRIPTION |
| | | | | | | | | | ASSOCIATED VIRUS P5 | REGULATION/DNA) YING-YANG 1; |
| | | | | | | | | | INITIATOR ELEMENT DNA; | TRANSCRIPTION INITIATION, |
| | | | | | | | | | CHAIN: A, B; | INITIATOR ELEMENT, YY1, ZINC 2 |
| | | | | | | | | | | FINGER PROTEIN, DNA-PROTEIN |
| | | | | | | | | | | RECOGNITION, 3 COMPLEX |
| | | | | | | | | | | (TRANSCRIPTION |
| | | | | | | | | | | REGULATION/DNA) |
| 289 | 1ubd | C | 640 | 752 | 1.2e−52 | −0.15 | 0.77 | | YY1; CHAIN: C; ADENO- | COMPLEX (TRANSCRIPTION |
| | | | | | | | | | ASSOCIATED VIRUS P5 | REGULATION/DNA) YING-YANG 1; |
| | | | | | | | | | INITIATOR ELEMENT DNA; | TRANSCRIPTION INITIATION, |
| | | | | | | | | | CHAIN: A, B; | INITIATOR ELEMENT, YY1, ZINC 2 |
| | | | | | | | | | | FINGER PROTEIN, DNA-PROTEIN |
| | | | | | | | | | | RECOGNITION, 3 COMPLEX |
| | | | | | | | | | | (TRANSCRIPTION |
| | | | | | | | | | | REGULATION/DNA) |
| 289 | 1ubd | C | 650 | 751 | 1.2e−33 | −0.06 | 0.92 | | YY1; CHAIN: C; ADENO- | COMPLEX (TRANSCRIPTION |
| | | | | | | | | | ASSOCIATED VIRUS P5 | REGULATION/DNA) YING-YANG 1; |
| | | | | | | | | | INITIATOR ELEMENT DNA; | TRANSCRIPTION INITIATION, |
| | | | | | | | | | CHAIN: A, B; | INITIATOR ELEMENT, YY1, ZINC 2 |
| | | | | | | | | | | FINGER PROTEIN, DNA-PROTEIN |
| | | | | | | | | | | RECOGNITION, 3 COMPLEX |
| | | | | | | | | | | (TRANSCRIPTION |
| | | | | | | | | | | REGULATION/DNA) |
| 289 | 1ubd | C | 668 | 779 | 7.5e−51 | 0.01 | 0.57 | | YY1; CHAIN: C; ADENO- | COMPLEX (TRANSCRIPTION |
| | | | | | | | | | ASSOCIATED VIRUS P5 | REGULATION/DNA) YING-YANG 1; |
| | | | | | | | | | INITIATOR ELEMENT DNA; | TRANSCRIPTION INITIATION, |
| | | | | | | | | | CHAIN: A, B; | INITIATOR ELEMENT, YY1, ZINC 2 |
| | | | | | | | | | | FINGER PROTEIN, DNA-PROTEIN |
| | | | | | | | | | | RECOGNITION, 3 COMPLEX |
| | | | | | | | | | | (TRANSCRIPTION |
| | | | | | | | | | | REGULATION/DNA) |
| 289 | 1ubd | C | 725 | 835 | 7.5e−53 | −0.06 | 0.93 | | YY1; CHAIN: C; ADENO- | COMPLEX (TRANSCRIPTION |
| | | | | | | | | | ASSOCIATED VIRUS P5 | REGULATION/DNA) YING-YANG 1; |
| | | | | | | | | | INITIATOR ELEMENT DNA; | TRANSCRIPTION INITIATION, |
| | | | | | | | | | CHAIN: A, B; | INITIATOR ELEMENT, YY1, ZINC 2 |
| | | | | | | | | | | FINGER PROTEIN, DNA-PROTEIN |
| | | | | | | | | | | RECOGNITION, 3 COMPLEX |
| | | | | | | | | | | (TRANSCRIPTION |
| | | | | | | | | | | REGULATION/DNA) |
| 289 | 1ubd | C | 734 | 835 | 1e−33 | 0.22 | 0.93 | | YY1; CHAIN: C; ADENO- | COMPLEX (TRANSCRIPTION |
| | | | | | | | | | ASSOCIATED VIRUS P5 | REGULATION/DNA) YING-YANG 1; |
| | | | | | | | | | INITIATOR ELEMENT DNA; | TRANSCRIPTION INITIATION, |
| | | | | | | | | | CHAIN: A, B; | INITIATOR ELEMENT, YY1, ZINC 2 |
| | | | | | | | | | | FINGER PROTEIN, DNA-PROTEIN |
| | | | | | | | | | | RECOGNITION, 3 COMPLEX |
| | | | | | | | | | | (TRANSCRIPTION |
| | | | | | | | | | | REGULATION/DNA) |
| 289 | 1ubd | C | 790 | 891 | 8.5e−33 | 0.26 | 0.87 | | YY1; CHAIN: C; ADENO- | COMPLEX (TRANSCRIPTION |
| | | | | | | | | | ASSOCIATED VIRUS P5 | REGULATION/DNA) YING-YANG 1; |
| | | | | | | | | | INITIATOR ELEMENT DNA; | TRANSCRIPTION INITIATION, |
| | | | | | | | | | CHAIN: A, B; | INITIATOR ELEMENT, YY1, ZINC 2 |
| | | | | | | | | | | FINGER PROTEIN, DNA-PROTEIN |
| | | | | | | | | | | RECOGNITION, 3 COMPLEX |
| | | | | | | | | | | (TRANSCRIPTION |
| | | | | | | | | | | REGULATION/DNA) |
| 289 | 1ubd | C | 808 | 935 | 9e−53 | 0.00 | 0.95 | | YY1; CHAIN: C; ADENO- | COMPLEX (TRANSCRIPTION |
| | | | | | | | | | ASSOCIATED VIRUS P5 | REGULATION/DNA) YING-YANG 1; |
| | | | | | | | | | INITIATOR ELEMENT DNA; | TRANSCRIPTION INITIATION, |
| | | | | | | | | | CHAIN: A, B; | INITIATOR ELEMENT, YY1, ZINC 2 |
| | | | | | | | | | | FINGER PROTEIN, DNA-PROTEIN |
| | | | | | | | | | | RECOGNITION, 3 COMPLEX |
| | | | | | | | | | | (TRANSCRIPTION |
| | | | | | | | | | | REGULATION/DNA) |
| 289 | 1ubd | C | 818 | 935 | 1.2e−31 | −0.14 | 0.92 | | YY1; CHAIN: C; ADENO- | COMPLEX (TRANSCRIPTION |
| | | | | | | | | | ASSOCIATED VIRUS P5 | REGULATION/DNA) YING-YANG 1; |
| | | | | | | | | | INITIATOR ELEMENT DNA; | TRANSCRIPTION INITIATION, |
| | | | | | | | | | CHAIN: A, B; | INITIATOR ELEMENT, YY1, ZINC 2 |
| | | | | | | | | | | FINGER PROTEIN, DNA-PROTEIN |
| | | | | | | | | | | RECOGNITION, 3 COMPLEX |
| | | | | | | | | | | (TRANSCRIPTION |
| | | | | | | | | | | REGULATION/DNA) |
| 289 | 1ubd | C | 864 | 991 | 9e−53 | 0.04 | 0.83 | | YY1; CHAIN: C; ADENO- | COMPLEX (TRANSCRIPTION |
| | | | | | | | | | ASSOCIATED VIRUS P5 | REGULATION/DNA) YING-YANG 1; |
| | | | | | | | | | INITIATOR ELEMENT DNA; | TRANSCRIPTION INITIATION, |
| | | | | | | | | | CHAIN: A, B; | INITIATOR ELEMENT, YY1, ZINC 2 |
| | | | | | | | | | | FINGER PROTEIN, DNA-PROTEIN |
| | | | | | | | | | | RECOGNITION, 3 COMPLEX |
| | | | | | | | | | | (TRANSCRIPTION |
| | | | | | | | | | | REGULATION/DNA) |
| 289 | 1ubd | C | 874 | 991 | 1.5e−27 | −0.28 | 0.66 | | YY1; CHAIN: C; ADENO- | COMPLEX (TRANSCRIPTION |
| | | | | | | | | | ASSOCIATED VIRUS P5 | REGULATION/DNA) YING-YANG 1; |
| | | | | | | | | | INITIATOR ELEMENT DNA; | TRANSCRIPTION INITIATION, |
| | | | | | | | | | CHAIN: A, B; | INITIATOR ELEMENT, YY1, ZINC 2 |
| | | | | | | | | | | FINGER PROTEIN, DNA-PROTEIN |
| | | | | | | | | | | RECOGNITION, 3 COMPLEX |
| | | | | | | | | | | (TRANSCRIPTION |
| | | | | | | | | | | REGULATION/DNA) |
| 289 | 1ubd | C | 964 | 1076 | 3e−53 | 0.10 | 0.99 | | YY1; CHAIN: C; ADENO- | COMPLEX (TRANSCRIPTION |
| | | | | | | | | | ASSOCIATED VIRUS P5 | REGULATION/DNA) YING-YANG 1; |
| | | | | | | | | | INITIATOR ELEMENT DNA; | TRANSCRIPTION INITIATION, |
| | | | | | | | | | CHAIN: A, B; | INITIATOR ELEMENT, YY1, ZINC 2 |
| | | | | | | | | | | FINGER PROTEIN, DNA-PROTEIN |
| | | | | | | | | | | RECOGNITION, 3 COMPLEX |
| | | | | | | | | | | (TRANSCRIPTION |
| | | | | | | | | | | REGULATION/DNA) |
| 289 | 2gli | A | 1022 | 1188 | 3e−72 | −0.09 | 0.96 | | ZINC FINGER PROTEIN GLI1; | COMPLEX (DNA-BINDING |
| | | | | | | | | | CHAIN: A; DNA; CHAIN: C, D; | PROTEIN/DNA) FIVE-FINGER GLI; |
| | | | | | | | | | | GLI, ZINC FINGER, COMPLEX (DNA- |
| | | | | | | | | | | BINDING PROTEIN/DNA) |
| 289 | 2gli | A | 1106 | 1273 | 7.5e−71 | 0.05 | 0.89 | | ZINC FINGER PROTEIN GLI1; | COMPLEX (DNA-BINDING |
| | | | | | | | | | CHAIN: A; DNA; CHAIN: C, D; | PROTEIN/DNA) FIVE-FINGER GLI; |
| | | | | | | | | | | GLI, ZINC FINGER, COMPLEX (DNA- |
| | | | | | | | | | | BINDING PROTEIN/DNA) |
| 289 | 2gli | A | 1190 | 1329 | 1.3e−67 | 0.30 | 1.00 | | ZINC FINGER PROTEIN GLI1; | COMPLEX (DNA-BINDING |
| | | | | | | | | | CHAIN: A; DNA; CHAIN: C, D; | PROTEIN/DNA) FIVE-FINGER GLI; |
| | | | | | | | | | | GLI, ZINC FINGER, COMPLEX (DNA- |
| | | | | | | | | | | BINDING PROTEIN/DNA) |
| 289 | 2gli | A | 1254 | 1382 | 5.1e−34 | 0.12 | 0.98 | | ZINC FINGER PROTEIN GLI1; | COMPLEX (DNA-BINDING |
| | | | | | | | | | CHAIN: A; DNA; CHAIN: C, D; | PROTEIN/DNA) FIVE-FINGER GLI; |
| | | | | | | | | | | GLI, ZINC FINGER, COMPLEX (DNA- |
| | | | | | | | | | | BINDING PROTEIN/DNA) |
| 289 | 2gli | A | 1302 | 1469 | 4.5e−67 | 0.04 | 0.86 | | ZINC FINGER PROTEIN GLI1; | COMPLEX (DNA-BINDING |
| | | | | | | | | | CHAlN: A; DNA; CHAIN: C, D; | PROTEIN/DNA) FIVE-FINGER GLI; |
| | | | | | | | | | | GLI, ZINC FINGER, COMPLEX (DNA- |
| | | | | | | | | | | BINDING PROTEIN/DNA) |
| 289 | 2gli | A | 1386 | 1525 | 4.5e−67 | 0.19 | 1.00 | | ZINC FINGER PROTEIN GLI1; | COMPLEX (DNA-BINDING |
| | | | | | | | | | CHAIN: A; DNA; CHAIN: C, D; | PROTEIN/DNA) FIVE-FINGER GLI; |
| | | | | | | | | | | GLI, ZINC FINGER, COMPLEX (DNA- |
| | | | | | | | | | | BINDING PROTEIN/DNA) |
| 289 | 2gli | A | 1414 | 1580 | 6e−71 | −0.20 | 0.92 | | ZINC FINGER PROTEIN GLI1; | COMPLEX (DNA-BINDING |
| | | | | | | | | | CHAIN: A; DNA; CHAIN: C, D; | PROTEIN/DNA) FIVE-FlNGER GLI; |
| | | | | | | | | | | GLI, ZINC FINGER, COMPLEX (DNA- |
| | | | | | | | | | | BINDING PROTEIN/DNA) |
| 289 | 2gli | A | 1498 | 1716 | 1.5e−66 | −0.17 | 0.16 | | ZINC FINGER PROTEIN GLI1; | COMPLEX (DNA-BINDING |
| | | | | | | | | | CHAIN: A; DNA; CHAIN: C, D; | PROTEIN/DNA) FIVE-FINGER GLI; |
| | | | | | | | | | | GLI, ZINC FINGER, COMPLEX (DNA- |
| | | | | | | | | | | BINDING PROTEIN/DNA) |
| 289 | 2gli | A | 1534 | 1662 | 1.7e−32 | 0.03 | 0.63 | | ZINC FINGER PROTEIN GLI1; | COMPLEX (DNA-BINDING |
| | | | | | | | | | CHAIN: A; DNA; CHAIN: C, D; | PROTEIN/DNA) FIVE-FINGER GLI; |
| | | | | | | | | | | GLI, ZINC FINGER, COMPLEX (DNA- |
| | | | | | | | | | | BINDING PROTEIN/DNA) |
| 289 | 2gli | A | 1554 | 1744 | 4.5e−67 | −0.17 | 0.59 | | ZINC FINGER PROTEIN GLI1; | COMPLEX (DNA-BINDING |
| | | | | | | | | | CHAIN: A; DNA; CHAIN: C, D; | PROTEIN/DNA) FIVE-FINGER GLI; |
| | | | | | | | | | | GLI, ZINC FINGER, COMPLEX (DNA- |
| | | | | | | | | | | BINDING PROTEIN/DNA) |
| 289 | 2gli | A | 1590 | 1713 | 1.7e−30 | −0.13 | 0.78 | | ZINC FINGER PROTEIN GLI1; | COMPLEX (DNA-BINDING |
| | | | | | | | | | CHAIN: A; DNA; CHAIN: C, D; | PROTEIN/DNA) FIVE-FINGER GLI; |
| | | | | | | | | | | GLI, ZINC FINGER, COMPLEX (DNA- |
| | | | | | | | | | | BINDING PROTEIN/DNA) |
| 289 | 2gli | A | 1638 | 1768 | 4.5e−65 | 0.18 | 0.86 | | ZINC FINGER PROTEIN GLI1; | COMPLEX (DNA-BINDING |
| | | | | | | | | | CHAIN: A; DNA; CHAIN: C, D; | PROTEIN/DNA) FIVE-FINGER GLI; |
| | | | | | | | | | | GLI, ZINC FINGER, COMPLEX (DNA- |
| | | | | | | | | | | BINDING PROTEIN/DNA) |
| 289 | 2gli | A | 1646 | 1797 | 8.5e−33 | 0.00 | 0.62 | | ZINC FINGER PROTEIN GLI1; | COMPLEX (DNA-BINDING |
| | | | | | | | | | CHAIN: A; DNA; CHAIN: C, D; | PROTEIN/DNA) FIVE-FINGER GLI; |
| | | | | | | | | | | GLI, ZINC FINGER, COMPLEX (DNA- |
| | | | | | | | | | | BINDING PROTEIN/DNA) |
| 289 | 2gli | A | 558 | 694 | 3.4e−33 | −0.28 | 0.62 | | ZINC FINGER PROTEIN GLI1; | COMPLEX (DNA-BINDING |
| | | | | | | | | | CHAIN: A; DNA; CHAIN: C, D; | PROTEIN/DNA) FIVE-FINGER GLI; |
| | | | | | | | | | | GLI, ZINC FINGER, COMPLEX (DNA- |
| | | | | | | | | | | BINDING PROTEIN/DNA) |
| 289 | 2gli | A | 587 | 725 | 1.5e−53 | −0.31 | 0.19 | | ZINC FINGER PROTEIN GLI1; | COMPLEX (DNA-BINDING |
| | | | | | | | | | CHAIN: A; DNA; CHAIN: C, D; | PROTEIN/DNA) FIVE-FINGER GLI; |
| | | | | | | | | | | GLI, ZINC FINGER, COMPLEX (DNA- |
| | | | | | | | | | | BINDING PROTEIN/DNA) |
| 289 | 2gli | A | 614 | 781 | 1.5e−63 | −0.20 | 0.49 | | ZINC FINGER PROTEIN GLI1; | COMPLEX (DNA-BINDING |
| | | | | | | | | | CHAIN: A; DNA; CHAIN: C, D; | PROTEIN/DNA) FIVE-FINGER GLI; |
| | | | | | | | | | | GLI, ZINC FINGER, COMPLEX (DNA- |
| | | | | | | | | | | BINDING PROTEIN/DNA) |
| 289 | 2gli | A | 622 | 753 | 1e−33 | 0.11 | 0.46 | | ZINC FINGER PROTEIN GLI1; | COMPLEX (DNA-BINDING |
| | | | | | | | | | CHAIN: A; DNA; CHAIN: C, D; | PROTEIN/DNA) FIVE-FINGER GLI; |
| | | | | | | | | | | GLI, ZINC FINGER, COMPLEX (DNA- |
| | | | | | | | | | | BINDING PROTEIN/DNA) |
| 289 | 2gli | A | 642 | 809 | 1.5e−68 | 0.01 | 0.96 | | ZINC FINGER PROTEIN GLI1; | COMPLEX (DNA-BINDING |
| | | | | | | | | | CHAIN: A; DNA; CHAIN: C, D; | PROTEIN/DNA) FIVE-FINGER GLI; |
| | | | | | | | | | | GLI, ZINC FINGER, COMPLEX (DNA- |
| | | | | | | | | | | BINDING PROTEIN/DNA) |
| 289 | 2gli | A | 670 | 837 | 3e−66 | −0.19 | 0.84 | | ZINC FINGER PROTEIN GLI1; | COMPLEX (DNA-BINDING |
| | | | | | | | | | CHAIN: A; DNA; CHAIN: C, D; | PROTEIN/DNA) FIVE-FINGER GLI; |
| | | | | | | | | | | GLI, ZINC FINGER, COMPLEX (DNA- |
| | | | | | | | | | | BINDING PROTEIN/DNA) |
| 289 | 2gli | A | 726 | 893 | 6e−68 | 0.00 | 0.98 | | ZINC FINGER PROTEIN GLI1; | COMPLEX (DNA-BINDING |
| | | | | | | | | | CHAIN: A; DNA; CHAIN: C, D; | PROTEIN/DNA) FIVE-FINGER GLI; |
| | | | | | | | | | | GLI, ZINC FINGER, COMPLEX (DNA- |
| | | | | | | | | | | BINDING PROTEIN/DNA) |
| 289 | 2gli | A | 734 | 862 | 1.5e−33 | 0.06 | 0.82 | | ZINC FINGER PROTEIN GLI1; | COMPLEX (DNA-BINDING |
| | | | | | | | | | CHAIN: A; DNA; CHAIN: C, D; | PROTEIN/DNA) FIVE-FINGER GLI; |
| | | | | | | | | | | GLI, ZINC FINGER, COMPLEX (DNA- |
| | | | | | | | | | | BINDING PROTEIN/DNA) |
| 289 | 2gli | A | 790 | 934 | 1.7e−30 | −0.04 | 0.40 | | ZINC FINGER PROTEIN GLI1; | COMPLEX (DNA-BlNDING |
| | | | | | | | | | CHAIN: A; DNA; CHAIN: C, D; | PROTEIN/DNA) FIVE-FINGER GLI; |
| | | | | | | | | | | GLI, ZINC FINGER, COMPLEX (DNA- |
| | | | | | | | | | | BINDING PROTEIN/DNA) |
| 289 | 2gli | A | 838 | 992 | 1.5e−69 | −0.00 | 0.69 | | ZINC FINGER PROTEIN GLI1; | COMPLEX (DNA-BINDING |
| | | | | | | | | | CHAIN: A; DNA; CHAIN: C, D; | PROTEIN/DNA) FIVE-FINGER GLI; |
| | | | | | | | | | | GLI, ZINC FINGER, COMPLEX (DNA- |
| | | | | | | | | | | BINDING PROTEIN/DNA) |
| 289 | 2gli | A | 874 | 993 | 1.7e−26 | −0.10 | 0.81 | | ZINC FINGER PROTEIN GLI1; | COMPLEX (DNA-BINDING |
| | | | | | | | | | CHAIN: A; DNA; CHAIN: C, D; | PROTEIN/DNA) FIVE-FINGER GLI; |
| | | | | | | | | | | GLI, ZINC FINGER, COMPLEX (DNA- |
| | | | | | | | | | | BINDING PROTEIN/DNA) |
| 289 | 2gli | A | 910 | 1077 | 4.5e−70 | −0.01 | 0.96 | | ZINC FINGER PROTEIN GLI1; | COMPLEX (DNA-BINDING |
| | | | | | | | | | CHAIN: A; DNA; CHAIN: C, D; | PROTEIN/DNA) FIVE-FINGER GLI; |
| | | | | | | | | | | GLI, ZINC FINGER, COMPLEX (DNA- |
| | | | | | | | | | | BINDING PROTEIN/DNA) |
| 289 | 2gli | A | 938 | 1105 | 1.5e−69 | 0.03 | 0.87 | | ZINC FINGER PROTEIN GLI1; | COMPLEX (DNA-BINDING |
| | | | | | | | | | CHAIN: A; DNA; CHAIN: C, D; | PROTEIN/DNA) FIVE-FINGER (GLI; |
| | | | | | | | | | | GLI, ZINC FINGER, COMPLEX (DNA- |
| | | | | | | | | | | BINDING PROTEIN/DNA) |
| 291 | 1cic | B | 20 | 66 | 1.5e−23 | −0.58 | 0.06 | | IG HEAVY CHAIN V REGIONS; | IMMUNOGLOBULIN |
| | | | | | | | | | CHAIN: A; IG HEAVY CHAIN V | IMMUNOGLOBULIN, FAB COMPLEX, |
| | | | | | | | | | REGIONS; CHAIN: B; IG HEAVY | IDIOTOPE, ANTI-IDIOTOPE |
| | | | | | | | | | CHAIN V REGIONS; CHAIN: C; IG | |
| | | | | | | | | | HEAVY CHAIN V REGIONS; | |
| | | | | | | | | | CHAIN: D; | |
| 291 | 1fsk | C | 20 | 66 | 8.5e−22 | −0.56 | 0.00 | | MAJOR POLLEN ALLERGEN BET | IMMUNE SYSTEM BET V I-A, BETVI |
| | | | | | | | | | V I-A; CHAIN: A, D, G, J; | ALLERGEN; BV16 FAB-FRAGMENT, |
| | | | | | | | | | IMMUNOGLOBULIN KAPPA | KAPPA MOPC21 CODING SEQUENCE; |
| | | | | | | | | | LIGHT CHAIN; CHAIN: B, E, H, K; | HEAVY CHAIN OF THE |
| | | | | | | | | | ANTIBODY HEAVY CHAIN FAB; | MONOCLONAL ANTIBODY MST2; |
| | | | | | | | | | CHAIN: C, F, I, L; | BET V I, BV16 FAB FRAGMENT, |
| | | | | | | | | | | ANTIBODY ALLERGEN COMPLEX |
| 291 | 1jhl | 11 | 20 | 66 | 6.8e−22 | −0.72 | 0.09 | | COMPLEX(ANTIBODY-ANTIGEN) | |
| | | | | | | | | | FV FRAGMENT (IGG1, KAPPA) | |
| | | | | | | | | | (LIGHT AND HEAVY VARIABLE | |
| | | | | | | | | | DOMAINS 1JHL 3 NON- | |
| | | | | | | | | | COVALENTLY ASSOCIATED) OF | |
| | | | | | | | | | MONOCLONAL ANTI-HEN EGG | |
| | | | | | | | | | 1JHL 4 LYSOZYME ANTIBODY | |
| | | | | | | | | | DI1.15 COMPLEX WITH | |
| | | | | | | | | | PHEASANT EGG 1JHL 5 | |
| | | | | | | | | | LYSOZYME 1JHL 6 | |
| 292 | 1vsg | A | 123 | 181 | 0.00075 | 0.36 | 0.09 | | GLYCOPROTEIN VARIANT | |
| | | | | | | | | | SURFACE GLYCOPROTEIN (N- | |
| | | | | | | | | | TERMINAL DOMAIN) 1VSG 3 | |
| 295 | 1btk | A | 30 | 118 | 6e−09 | 0.21 | 0.07 | | BRUTON'S TYROSINE KINASE; | TRANSFERASE BRUTON'S |
| | | | | | | | | | CHAIN: A, B; | AGAMMAGLOBULINEMIA |
| | | | | | | | | | | TYROSINE KINASE, BTK; |
| | | | | | | | | | | TRANSFERASE, PH DOMAIN, BTK |
| | | | | | | | | | | MOTIF, ZINC BINDING, X-LINKED 2 |
| | | | | | | | | | | AGAMMAGLOBULINEMIA, |
| | | | | | | | | | | TYROSINE-PROTEIN KINASE |
| 295 | 1btn | | 30 | 110 | 1.3e−08 | 0.20 | 0.25 | | BETA-SPECTRIN; 1BTN 4 CHAIN: | SIGNAL TRANSDUCTION PROTEIN |
| | | | | | | | | | NULL; 1BTN 5 | |
| 295 | 1tb8 | A | 22 | 114 | 1.5e−18 | 0.62 | 0.92 | | DUAL ADAPTOR OF | SIGNALING PROTEIN DAPPI, PHISH, |
| | | | | | | | | | PHOSPHOTYROSINE AND 3- | BAM32; PLECKSTRIN, 3- |
| | | | | | | | | | CHAIN: A; | PHOSPHOINOSITIDES, INOSITOL |
| | | | | | | | | | | TETRAKISPHOSPHATE 2 SIGNAL |
| | | | | | | | | | | TRANSDUCTION PROTEIN, ADAPTOR |
| | | | | | | | | | | PROTEIN |
| 295 | 1fgy | A | 9 | 115 | 1.5e−14 | 0.48 | 0.77 | | GRP1; CHAIN: A; | SIGNALING PROTEIN ARFI GUANINE |
| | | | | | | | | | | NUCLEOTIDE EXCHANGE FACTOR |
| | | | | | | | | | | AND PH DOMAIN |
| 295 | 1pls | | 1 | 115 | 1.5e−14 | 0.69 | 0.95 | | PHOSPHORYLATION | |
| | | | | | | | | | PLECKSTRIN (N-TERMINAL | |
| | | | | | | | | | PLECKSTRIN HOMOLOGY | |
| | | | | | | | | | DOMAIN) MUTANT 1PLS 3 WITH | |
| | | | | | | | | | LEU GLU (HIS)6 ADDED TO THE C | |
| | | | | | | | | | TERMINUS 1PLS 4 (INS(G105- | |
| | | | | | | | | | LEHHHHHH)) (NMR, 25 | |
| | | | | | | | | | STRUCTURES) 1PLS 5 | |
| 295 | 1pms | | 33 | 114 | 1.5e−11 | 0.13 | 0.01 | | SOS 1; CHAIN: NULL; | SIGNAL TRANSDUCTION SON OF |
| | | | | | | | | | | SEVENLESS; PLECKSTRIN, SON OF |
| | | | | | | | | | | SEVENLESS, SIGNAL |
| | | | | | | | | | | TRANSDUCTION |
| 295 | 1qqg | A | 33 | 204 | 3e−18 | 0.20 | −0.14 | | INSULIN RECEPTOR SUBSTRATE | SIGNAL TRANSDUCTION IRS-1; |
| | | | | | | | | | 1; CHAIN: A, B; | BETA-SANDWHICH, SIGNAL |
| | | | | | | | | | | TRANSDUCTION |
| 296 | 1qgq | A | 296 | 467 | 4.5e−05 | −0.21 | 0.13 | | SPORE COAT POLYSACCHARIDE | TRANSFERASE |
| | | | | | | | | | BIOSYNTHESIS PROTEIN CHAIN: | GLYCOSYLTRANSFERASE |
| | | | | | | | | | A; | |
| 297 | 1erj | A | 106 | 437 | 1.7e−59 | 0.03 | 0.34 | | TRANSCRIPTIONAL REPRESSOR | TRANSCRIPTION INHIBITOR BETA- |
| | | | | | | | | | TUP1; CHAIN: A, B, C; | PROPELLER |
| 297 | 1erj | A | 183 | 481 | 5.1e−58 | 0.24 | −0.09 | | TRANSCRIPTIONAL REPRESSOR | TRANSCRIPTION INHIBITOR BETA- |
| | | | | | | | | | TUP1; CHAIN: A, B, C; | PROPELLER |
| 297 | 1erj | A | 5 | 251 | 1.7e−47 | −0.04 | 0.34 | | TRANSCRIPTIONAL REPRESSOR | TRANSCRIPTION INHIBITOR BETA- |
| | | | | | | | | | TUP1; CHAIN: A, B, C; | PROPELLER |
| 297 | 1erj | A | 54 | 352 | 6.8e−50 | 0.21 | 0.95 | | TRANSCRIPTIONAL REPRESSOR | TRANSCRIPTION INHIBITOR BETA- |
| | | | | | | | | | TUP1; CHAIN: A, B, C; | PROPELLER |
| 297 | 1got | B | 170 | 479 | 3.4e−56 | 0.24 | −0.14 | | GT-ALPHA/GI-ALPHA CHIMERA; | COMPLEX (GTP- |
| | | | | | | | | | CHAIN: A; GT-BETA; CHAIN: B; | BINDING/TRANSDUCER) BETA1, |
| | | | | | | | | | GT-GAMMA; CHAIN: G; | TRANSDUCIN BETA SUBUNIT; |
| | | | | | | | | | | GAMMA1, TRANSDUCIN GAMMA |
| | | | | | | | | | | SUBUNIT; COMPLEX (GTP- |
| | | | | | | | | | | BINDING/TRANSDUCER), G PROTEIN, |
| | | | | | | | | | | HETEROTRIMER 2 SIGNAL |
| | | | | | | | | | | TRANSDUCTION |
| 297 | 1got | B | 2 | 252 | 3.4e−39 | −0.24 | 0.16 | | GT-ALPHA/GI-ALPHA CHIMERA; | COMPLEX (GTP- |
| | | | | | | | | | CHAIN: A; GT-BETA; CHAIN: B; | BINDING/TRANSDUCER) BETA1, |
| | | | | | | | | | GT-GAMMA; CHAIN: G; | TRANSDUCIN BETA SUBUNIT; |
| | | | | | | | | | | GAMMA1, TRANSDUCIN GAMMA |
| | | | | | | | | | | SUBUNIT; COMPLEX (GTP- |
| | | | | | | | | | | BINDING/TRANSDUCER), G PROTEIN, |
| | | | | | | | | | | HETEROTRIMER 2 SIGNAL |
| | | | | | | | | | | TRANSDUCTION |
| 297 | 1got | B | 31 | 297 | 3.4e−44 | 0.33 | 0.98 | | GT-ALPHA/GI-ALPHA CHIMERA; | COMPLEX (GTP- |
| | | | | | | | | | CHAIN: A; GT-BETA; CHAIN: B; | BINDING/TRANSDUCER) BETA1, |
| | | | | | | | | | GT-GAMMA; CHAIN: G; | TRANSDUCIN BETA SUBUNIT; |
| | | | | | | | | | | GAMMA1, TRANSDUCIN GAMMA |
| | | | | | | | | | | SUBUNIT; COMPLEX (GTP- |
| | | | | | | | | | | BINDING/TRANSDUCER), G PROTEIN, |
| | | | | | | | | | | HETEROTRIMER 2 SIGNAL |
| | | | | | | | | | | TRANSDUCTION |
| 297 | 1got | B | 35 | 369 | 3.4e−66 | | | 59.96 | GT-ALPHA/GI-ALPHA CHIMERA; | COMPLEX (GTP- |
| | | | | | | | | | CHAIN: A; GT-BETA; CHAIN: B; | BINDING/TRANSDUCER) BETA1, |
| | | | | | | | | | GT-GAMMA; CHAIN: G; | TRANSDUCIN BETA SUBUNIT; |
| | | | | | | | | | | GAMMA1, TRANSDUCIN GAMMA |
| | | | | | | | | | | SUBUNIT; COMPLEX (GTP- |
| | | | | | | | | | | BINDING/TRANSDUCER), G PROTEIN, |
| | | | | | | | | | | HETEROTRIMER 2 SIGNAL |
| | | | | | | | | | | TRANSDUCTION |
| 297 | 1got | B | 52 | 349 | 8.5e−51 | 0.12 | 0.96 | | GT-ALPHA/GI-ALPHA CHIMERA; | COMPLEX (GTP- |
| | | | | | | | | | CHAIN: A; GT-BETA; CHAIN: B; | BINDING/TRANSDUCER) BETA1, |
| | | | | | | | | | GT-GAMMA; CHAIN: G; | TRANSDUCIN BETA SUBUNIT; |
| | | | | | | | | | | GAMMA1,TRANSDUCIN GAMMA |
| | | | | | | | | | | SUBUNIT; COMPLEX (GTP- |
| | | | | | | | | | | BINDING/TRANSDUCER), G PROTEIN, |
| | | | | | | | | | | HETEROTRIMER 2 SIGNAL |
| | | | | | | | | | | TRANSDUCTION |
| 297 | 1got | B | 98 | 389 | 3.4e−66 | 0.28 | 0.77 | | GT-ALPHA/GI-ALPHA CHIMERA; | COMPLEX (GTP- |
| | | | | | | | | | CHAIN: A; GT-BETA; CHAIN: B; | BINDING/TRANSDUCER) BETA1, |
| | | | | | | | | | GT-GAMMA; CHAIN: G; | TRANSDUCIN BETA SUBUNIT; |
| | | | | | | | | | | GAMMA1, TRANSDUCIN GAMMA |
| | | | | | | | | | | SUBUNIT; COMPLEX (GTP- |
| | | | | | | | | | | BINDING/TRANSDUCER), G PROTEIN, |
| | | | | | | | | | | HETEROTRIMER 2 SIGNAL |
| | | | | | | | | | | TRANSDUCTION |
| 298 | 1a4y | A | 32 | 208 | 7.5e−12 | 0.44 | 0.58 | | RIBONUCLEASE INHIBITOR; | COMPLEX (INHIBITOR/NUCLEASE) |
| | | | | | | | | | CHAIN: A, D; ANGIOGENIN; | COMPLEX (INHIBITOR/NUCLEASE), |
| | | | | | | | | | CHAIN: B, E; | COMPLEX (RI-ANG), HYDROLASE 2 |
| | | | | | | | | | | MOLECULAR RECOGNITION, |
| | | | | | | | | | | EPITOPE MAPPING, LEUCINE-RICH 3 |
| | | | | | | | | | | REPEATS |
| 298 | 1a4y | A | 49 | 223 | 1.4e−10 | 0.05 | 0.98 | | RIBONUCLEASE INHIBITOR; | COMPLEX (INHIBITOR/NUCLEASE) |
| | | | | | | | | | CHAIN: A, D; ANGIOGENIN; | COMPLEX (INHIBITOR/NUCLEASE), |
| | | | | | | | | | CHAIN: B, E; | COMPLEX (RI-ANG), HYDROLASE 2 |
| | | | | | | | | | | MOLECULAR RECOGNITION, |
| | | | | | | | | | | EPITOPE MAPPING, LEUCINE-RICH 3 |
| | | | | | | | | | | REPEATS |
| 298 | 1a9n | A | 112 | 218 | 0.00051 | 0.18 | 0.40 | | U2 RNA HAIRPIN IV; CHAIN: Q, R; | COMPLEX (NUCLEAR PROTEIN/RNA) |
| | | | | | | | | | U2 A′; CHAIN: A, C; U2 B″; CHAIN: | COMPLEX (NUCLEAR |
| | | | | | | | | | B, D;, | PROTEIN/RNA), RNA, |
| | | | | | | | | | | SNRNP, RIBONUCLEOPROTEIN |
| 298 | 1d0b | A | 49 | 219 | 5.1e−13 | 0.22 | 0.64 | | INTERNALIN B; CHAIN: A; | CELL ADHESION LEUCINE RICH |
| | | | | | | | | | | REPEAT, CALCIUM BINDING, CELL |
| | | | | | | | | | | ADHESION |
| 298 | 1dce | A | 53 | 174 | 1.7e−07 | 0.02 | 0.05 | | RAB | TRANSFERASE CRYSTAL |
| | | | | | | | | | GERANYLGERANYLTRANSFERA | STRUCTURE, RAB |
| | | | | | | | | | SE ALPHA SUBUNIT; CHAIN: A, C; | GERANYLGERANYLTRANSFERASE, |
| | | | | | | | | | RAB | 2.0 A 2 RESOLUTION, N- |
| | | | | | | | | | GERANYLGERANYLTRANSFERA | FORMYLMETHIONINE, ALPHA |
| | | | | | | | | | SE BETA SUBUNIT; CHAIN: B, D; | SUBUNIT, BETA SUBUNIT |
| 298 | 1ds9 | A | 113 | 216 | 1.2e−09 | −0.06 | 0.04 | | OUTER ARM DYNEIN; CHAIN: A; | CONTRACTILE PROTEIN LEUCINE- |
| | | | | | | | | | | RICH REPEAT, BETA-BETA-ALPHA |
| | | | | | | | | | | CYLINDER, DYNEIN, 2 |
| | | | | | | | | | | CHLAMYDOMONAS, FLAGELLA |
| 298 | 1fol | A | 124 | 210 | 1.7e−09 | 0.13 | 0.37 | | NUCLEAR RNA EXPORT FACTOR | RNA BINDING PROTEIN TAP (NFX1); |
| | | | | | | | | | 1; CHAIN: A, B; | RIBONUCLEOPROTEIN (RNP, RBD OR |
| | | | | | | | | | | RRM) AND LEUCINE-RICH-REPEAT 2 |
| | | | | | | | | | | (LRR) |
| 298 | 1fol | B | 124 | 210 | 1.7e−09 | 0.06 | 0.13 | | NUCLEAR RNA EXPORT FACTOR | RNA BINDING PROTEIN TAP (NFX1); |
| | | | | | | | | | 1; CHAIN: A, B; | RIBONUCLEOPROTEIN (RNP, RBD OR |
| | | | | | | | | | | RRM) AND LEUCINE-RICH-REPEAT 2 |
| | | | | | | | | | | (LRR) |
| 298 | 1fqv | A | 129 | 214 | 5.1e−11 | 0.28 | 0.46 | | SKP2; CHAIN: A, C, E, G, I, K, M, O; | LIGASE CYCLIN A/CDK2- |
| | | | | | | | | | SKP1; CHAIN: B, D, F, H, J, I, N, P; | ASSOCIATED PROTEIN P45; CYCLIN |
| | | | | | | | | | | A/CDK2-ASSOCIATED PROTEIN P19; |
| | | | | | | | | | | SKP1, SKP2, F-BOX, LRR, LEUCINE- |
| | | | | | | | | | | RICH REPEAT, SCF, UBIQUITIN, 2 E3, |
| | | | | | | | | | | UBIQUITIN PROTEIN LIGASE |
| 298 | 1fqv | A | 33 | 140 | 1.5e−08 | 0.04 | −0.02 | | SKP2; CHAIN: A, C, E, G, I, K, M, O; | LIGASE CYCLIN A/CDK2- |
| | | | | | | | | | SKP1; CHAIN: B, D, F, H, J, L, N, P; | ASSOCIATED PROTEIN P45; CYCLIN |
| | | | | | | | | | | A/CDK2-ASSOCIATED PROTEIN P19; |
| | | | | | | | | | | SKP1, SKP2, F-BOX, LRR, LEUCINE- |
| | | | | | | | | | | RICH REPEAT, SCF, UBIQUITIN, 2 E3, |
| | | | | | | | | | | UBIQUITIN PROTEIN LIGASE |
| 298 | 1fqv | A | 39 | 191 | 3e−21 | 0.95 | 1.00 | | SKP2; CHAIN: A, C, E, G, I, K, M, O; | LIGASE CYCLIN A/CDK2- |
| | | | | | | | | | SKP1; CHAIN: B, D, F, H, J, L, N, P; | ASSOCIATED PROTEIN P45; CYCLIN |
| | | | | | | | | | | A/CDK2-ASSOCIATED PROTEIN P19; |
| | | | | | | | | | | SKP1, SKP2, F-BOX, LRR, LEUCINE- |
| | | | | | | | | | | RICH REPEAT, SCF, UBIQUITIN, 2 E3, |
| | | | | | | | | | | UBIQUITIN PROTEIN LIGASE |
| 298 | 1fqv | A | 49 | 207 | 6.8e−19 | 0.54 | 0.96 | | SKP2; CHAIN: A, C, E, G, I, K, M, O; | LIGASE CYCLIN A/CDK2- |
| | | | | | | | | | SKP1; CHAIN: B, D, F, H, J, L, N, P; | ASSOCIATED PROTEIN P45; CYCLIN |
| | | | | | | | | | | A/CDK2-ASSOCIATED PROTEIN P19; |
| | | | | | | | | | | SKP1, SKP2, F-BOX, LRR, LEUCINE- |
| | | | | | | | | | | RICH REPEAT, SCF, UBIQUITIN, 2 E3, |
| | | | | | | | | | | UBIQUITIN PROTEIN LIGASE |
| 298 | 1fqv | A | 70 | 199 | 4.5e−19 | 0.85 | 0.92 | | SKP2; CHAIN: A, C, E, G, I, K, M, O; | LIGASE CYCLIN A/CDK2- |
| | | | | | | | | | SKP1; CHAIN: B, D, F, H, J, L, N, P; | ASSOCIATED PROTEIN P45; CYCLIN |
| | | | | | | | | | | A/CDK2-ASSOCIATED PROTEIN P19; |
| | | | | | | | | | | SKP1, SKP2, F-BOX, LRR, LEUCINE- |
| | | | | | | | | | | RICH REPEAT, SCF, UBIQUITIN, 2 E3, |
| | | | | | | | | | | UBIQUITIN PROTEIN LIGASE |
| 298 | 1fs2 | A | 129 | 214 | 5.1e−11 | −0.35 | 0.27 | | SKP2; CHAIN: A, C; SKP1; CHAIN: | LIGASE CYCLIN A/CDK2- |
| | | | | | | | | | B, D; | ASSOCIATED P45; CYCLIN A/CDK2- |
| | | | | | | | | | | ASSOCIATED P19; SKP1, SKP2, F-BOX, |
| | | | | | | | | | | LRRS, LEUCINE-RICH REPEATS, SCF, |
| | | | | | | | | | | 2 UBIQUITIN, E3, UBIQUITIN |
| | | | | | | | | | | PROTEIN LIGASE |
| 298 | 1fs2 | A | 49 | 207 | 6.8e−19 | 0.64 | 0.77 | | SKP2; CHAIN: A, C; SKP1; CHAIN: | LIGASE CYCLIN A/CDK2- |
| | | | | | | | | | B, D; | ASSOCIATED P45; CYCLIN A/CDK2- |
| | | | | | | | | | | ASSOCIATED P19; SKP1, SKP2, F-BOX, |
| | | | | | | | | | | LRRS, LEUCINE-RICH REPEATS, SCF, |
| | | | | | | | | | | 2 UBIQUITIN, E3, UBIQUITIN |
| | | | | | | | | | | PROTEIN LIGASE |
| 298 | 1yrg | A | 111 | 220 | 1e−08 | −0.38 | 0.23 | | GTPASE-ACTIVATING PROTEIN | TRANSCRIPTION RNA1P; RANGAP; |
| | | | | | | | | | RNA1_SCHPO; CHAIN: A, B; | GTPASE-ACTIVATING PROTEIN FOR |
| | | | | | | | | | | SPI1, GTPASE-ACTIVATING PROTEIN, |
| | | | | | | | | | | GAP, RNA1P, RANGAP, LRR, |
| | | | | | | | | | | LEUCINE-2 RICH REPEAT PROTEIN, |
| | | | | | | | | | | TWINNING, HEMIHEDRAL |
| | | | | | | | | | | TWINNING, 3 MEROHEDRAL |
| | | | | | | | | | | TWINNING, MEROHEDRY |
| 298 | 2bnh | | 113 | 223 | 1.4e−08 | 0.31 | 0.76 | | RIBONUCLEASE INHIBITOR; | ACETYLATION RNASE INHIBITOR, |
| | | | | | | | | | CHAIN: NULL; | RIBONUCLEASE/ANGIOGENIN |
| | | | | | | | | | | INHIBITOR ACETYLATION, |
| | | | | | | | | | | LEUCINE-RICH REPEATS |
| 298 | 2bnh | | 53 | 217 | 1e−10 | 0.32 | 1.00 | | RIBONUCLEASE INHIBITOR; | ACETYLATION RNASE INHIBITOR, |
| | | | | | | | | | CHAIN: NULL; | RIBONUCLEASE/ANGIOGENIN |
| | | | | | | | | | | INHIBITOR ACETYLATION, |
| | | | | | | | | | | LEUCINE-RICH REPEATS |
| 299 | 1brl | B | 4 | 151 | 3.4e−44 | 0.91 | 1.00 | | MYOSIN; CHAIN: A, B, C, D, E, F, | MUSCLE PROTEIN MDE; MUSCLE |
| | | | | | | | | | G, H; | PROTEIN |
| 299 | 1brl | B | 4 | 151 | 3.4e−44 | | | 219.13 | MYOSIN; CHAIN: A, B, C, D, E, F, | MUSCLE PROTEIN MDE; MUSCLE |
| | | | | | | | | | G, H; | PROTEIN |
| 299 | 1cdm | A | 4 | 149 | 1.7e−56 | 0.60 | 1.00 | | CALCIUM-BINDING PROTEIN | |
| | | | | | | | | | CALMODULIN COMPLEXED | |
| | | | | | | | | | WITH CALMODULIN-BINDING | |
| | | | | | | | | | DOMAIN OF 1CDM 3 | |
| | | | | | | | | | CALMODULIN-DEPENDENT | |
| | | | | | | | | | PROTEIN KINASE II 1CDM 4 | |
| 299 | 1cdm | A | 4 | 149 | 1.7e−56 | | | 103.28 | CALCIUM-BINDING PROTEIN | |
| | | | | | | | | | CALMODULIN COMPLEXED | |
| | | | | | | | | | WITH CALMODULIN-BINDING | |
| | | | | | | | | | DOMAIN OF 1CDM 3 | |
| | | | | | | | | | CALMODULIN-DEPENDENT | |
| | | | | | | | | | PROTEIN KINASE II 1CDM 4 | |
| 299 | 1cll | | 4 | 149 | 6.8e−62 | 0.49 | 1.00 | | CALCIUM-BINDING PROTEIN | |
| | | | | | | | | | CALMODULIN (VERTEBRATE) | |
| | | | | | | | | | 1CLL 3 | |
| 299 | 1cll | | 4 | 150 | 6.8e−62 | | | 113.59 | CALCIUM-BINDING PROTEIN | |
| | | | | | | | | | CALMODULIN (VERTEBRATE) | |
| | | | | | | | | | 1CLL 3 | |
| 299 | 1exr | A | 4 | 150 | 1.4e−59 | 0.40 | 1.00 | | CALMODULIN; CHAIN: A; | METAL TRANSPORT CALMODULIN, |
| | | | | | | | | | | HIGH RESOLUTION, DISORDER |
| 299 | 1tcf | | 3 | 151 | 1.7e−48 | | | 89.97 | TROPONIN C; CHAIN: NULL; | CALCIUM-REGULATED MUSCLE |
| | | | | | | | | | | CONTRACTION MUSCLE |
| | | | | | | | | | | CONTRACTION, CALCIUM-BINDING, |
| | | | | | | | | | | TROPONIN, E-F HAND, 2 OPEN |
| | | | | | | | | | | CONFORMATION REGULATORY |
| | | | | | | | | | | DOMAIN, CALCIUM-REGULATED 3 |
| | | | | | | | | | | MUSCLE CONTRACTION |
| 299 | 1tcf | | 4 | 148 | 1.7e−48 | 0.38 | 1.00 | | TROPONIN C; CHAIN: NULL; | CALCIUM-REGULATED MUSCLE |
| | | | | | | | | | | CONTRACTION MUSCLE |
| | | | | | | | | | | CONTRACTION, CALCIUM-BINDING, |
| | | | | | | | | | | TROPONIN, E-F HAND, 2 OPEN |
| | | | | | | | | | | CONFORMATION REGULATORY |
| | | | | | | | | | | DOMAIN, CALCIUM-REGULATED 3 |
| | | | | | | | | | | MUSCLE CONTRACTION |
| 299 | 1top | | 4 | 148 | 5.1e−49 | 0.57 | 1.00 | | CONTRACTILE SYSTEM PROTEIN | |
| | | | | | | | | | TROPONIN C 1TOP 3 | |
| 299 | 1top | | 4 | 151 | 5.1e−49 | | | 83.80 | CONTRACTILE SYSTEM PROTEIN | |
| | | | | | | | | | TROPONIN C 1TOP 3 | |
| 299 | 1vrk | A | 2 | 149 | 1.2e−60 | 0.72 | 1.00 | | CALMODULIN; CHAIN: A; RS20; | CALMODULIN, CALCIUM BINDING, |
| | | | | | | | | | CHAIN: B; | HELIX-LOOP-HELIX, SIGNALLING, 2 |
| | | | | | | | | | | COMPLEX(CALCIUM-BINDING |
| | | | | | | | | | | PROTEIN/PEPTIDE) |
| 299 | 1vrk | A | 2 | 151 | 1.2e−60 | | | 115.21 | CALMODULIN; CHAIN: A; RS20; | CALMODULIN, CALCIUM BINDING, |
| | | | | | | | | | CHAIN: B; | HELIX-LOOP-HELIX, SIGNALLING, 2 |
| | | | | | | | | | | COMPLEX(CALCIUM-BINDING |
| | | | | | | | | | | PROTEIN/PEPTIDE) |
| 300 | 1aox | A | 36 | 215 | 1.7e−28 | 0.37 | 0.83 | | INTEGRIN ALPHA 2 BETA; | INTEGRIN INTEGRIN, CELL |
| | | | | | | | | | CHAIN: A, B; | ADHESION, GLYCOPROTEIN |
| 300 | 1atz | A | 38 | 226 | 1.5e−23 | | | 72.47 | VON WILLEBRAND FACTOR; | COLLAGEN-BINDING COLLAGEN- |
| | | | | | | | | | CHAIN: A, B; | BINDING, HEMOSTASIS, |
| | | | | | | | | | | DINUCLEOTIDE BINDING FOLD |
| 300 | 1atz | A | 39 | 218 | 1.5e−23 | 0.88 | 1.00 | | VON WILLEBRAND FACTOR; | COLLAGEN-BINDING COLLAGEN- |
| | | | | | | | | | CHAIN: A, B; | BINDING, HEMOSTASIS, |
| | | | | | | | | | | DINUCLEOTIDE BINDING FOLD |
| 300 | 1auq | | 23 | 227 | 1.4e−35 | | | 62.36 | A1 DOMAIN OF VON | WILLEBRAND WILLEBRAND, BLOOD |
| | | | | | | | | | WILLEBRAND FACTOR; CHAIN: | COAGULATION, PLATELET, |
| | | | | | | | | | NULL; | GLYCOPROTEIN |
| 300 | 1auq | | 29 | 227 | 1.4e−35 | 0.57 | 1.00 | | A1 DOMAIN OF VON | WILLEBRAND WILLEBRAND, BLOOD |
| | | | | | | | | | WILLEBRAND FACTOR; CHAIN: | COAGULATION, PLATELET, |
| | | | | | | | | | NULL; | GLYCOPROTEIN |
| 300 | 1ck4 | A | 39 | 217 | 5.1e−29 | 0.58 | 1.00 | | INTEGRIN ALPHA-1; CHAIN: A, B; | STRUCTURAL PROTEIN 1-DOMAIN, |
| | | | | | | | | | | METAL BINDING, COLLAGEN, |
| | | | | | | | | | | ADHESION |
| 300 | 1fns | A | 36 | 227 | 5.1e−34 | 0.70 | 0.98 | | IMMUNOGLOBULIN NMC-4 IGG1; | IMMUNE SYSTEM VON |
| | | | | | | | | | CHAIN: L; IMMUNOGLOBULIN | WILLEBRAND FACTOR, |
| | | | | | | | | | NMC-4 IGG1; CHAIN: H; VON | GLYCOPROTEIN IBA (A; ALPHA) |
| | | | | | | | | | WILLEBRAND FACTOR; CHAIN: | BINDING, 2 COMPLEX |
| | | | | | | | | | A; | (WILLEBRAND/IMMUNOGLOBULIN), |
| | | | | | | | | | | BLOOD COAGULATION TYPE 3 2B |
| | | | | | | | | | | VON WILLEBRAND DISEASE |
| 300 | 1ido | | 39 | 224 | 5.1e−31 | | | 59.31 | INTEGRIN; CHAIN: NULL; | CELL ADHESION PROTEIN A- |
| | | | | | | | | | | DOMAIN INTEGRIN, CELL ADHESION |
| | | | | | | | | | | PROTEIN, GLYCOPROTEIN, |
| | | | | | | | | | | EXTRACELLULAR 2 MATRIX, |
| | | | | | | | | | | CYTOSKELETON |
| 300 | 1ido | | 41 | 217 | 5.1e−31 | 0.61 | 1.00 | | INTEGRIN; CHAIN: NULL; | CELL ADHESION PROTEIN A- |
| | | | | | | | | | | DOMAIN INTEGRIN, CELL ADHESION |
| | | | | | | | | | | PROTEIN, GLYCOPROTEIN, |
| | | | | | | | | | | EXTRACELLULAR 2 MATRIX, |
| | | | | | | | | | | CYTOSKELETON |
| 300 | 1lfa | A | 38 | 226 | 8.5e−23 | 0.53 | 0.99 | | CDI1A; ILFA 5 CHAIN: A, B; 1LFA 6 | CELL ADHESION LFA-1, ALPHA- |
| | | | | | | | | | | L\,BETA-2 INTEGRIN, A-DOMAIN; |
| | | | | | | | | | | ILFA 8 |
| 300 | 1lfa | A | 38 | 227 | 8.5e−23 | | | 53.04 | CDI1A; ILFA 5 CHAIN: A, B; ILFA 6 | CELL ADHESION LFA-L ALPHA- |
| | | | | | | | | | | L\, BETA-2 INTEGRIN, A-DOMAIN; |
| | | | | | | | | | | ILFA 8 |
| 300 | 1qc5 | A | 37 | 217 | 1.4e−28 | 0.41 | 0.94 | | ALPHAI BETA1 INTEGRIN; | CELL ADHESION INTEGRIN, CELL |
| | | | | | | | | | CHAIN: A; ALPHAI BETA1 | ADHESION |
| | | | | | | | | | INTEGRIN; CHAIN: B; | |
| 301 | 1bxe | A | 13 | 153 | 1.7e−33 | −0.14 | 0.71 | | RIBOSOMAL PROTEIN L22; | RNA BINDING PROTEIN RIBOSOMAL |
| | | | | | | | | | CHAIN: A; | PROTEIN, PROTEIN SYNTHESIS, RNA |
| | | | | | | | | | | BINDING, 2 ANTIBIOTICS |
| | | | | | | | | | | RESISTANCE, RNA BINDING |
| | | | | | | | | | | PROTEIN |
| 301 | 1flk | 0 | 2 | 152 | 1.7e−44 | 0.02 | 1.00 | | 23S RRNA; CHAIN: 0; 5S RRNA; | RIBOSOME 50S RIBOSOMAL |
| | | | | | | | | | CHAIN: 9; RIBOSOMAL PROTEIN | PROTEIN L2P, HMAL2, HL4; 50S |
| | | | | | | | | | L2; CHAIN: A; RIBOSOMAL | RIBOSOMAL PROTEIN L3P, HMAL3, |
| | | | | | | | | | PROTEIN L3; CHAIN: B; | HL1; 50S RIBOSOMAL PROTEIN L4E, |
| | | | | | | | | | RIBOSOMAL PROTEIN L4; CHAIN: | HMAL4, HL6; 50S RIBOSOMAL |
| | | | | | | | | | C; RIBOSOMAL PROTEIN L5; | PROTEIN L5P, HMAL5, HL13; 30S |
| | | | | | | | | | CHAIN: D; RIBOSOMAL PROTEIN | RIBOSOMAL PROTEIN HS6; 50S |
| | | | | | | | | | L7AE; CHAIN: E; RIBOSOMAL | RIBOSOMAL PROTEIN L13P, HMAL13; |
| | | | | | | | | | PROTEIN L10E; CHAIN: F; | 50S RIBOSOMAL PROTEIN L14P, |
| | | | | | | | | | RIBOSOMAL PROTEIN L13; | HMAL14, HL27; 50S RIBOSOMAL |
| | | | | | | | | | CHAIN: G; RIBOSOMAL PROTEIN | PROTEIN L15P, HMAL15, HL9; 50S |
| | | | | | | | | | L14; CHAIN: H; RIBOSOMAL | RIBOSOMAL PROTEIN L18P, HMAL18, |
| | | | | | | | | | PROTEIN L15E; CHAIN: I; | HL12; 50S RIBOSOMAL PROTEIN |
| | | | | | | | | | RIBOSOMAL PROTEIN L15; | L18E, HL29, L19; 50S RIBOSOMAL |
| | | | | | | | | | CHAIN: J; RIBOSOMAL PROTEIN | PROTEIN L19E, HMAL19, HL24; 50S |
| | | | | | | | | | L18; CHAIN: K; RIBOSOMAL | RIBOSOMAL PROTEIN L21E, HL31; |
| | | | | | | | | | PROTEIN L18E; CHAIN: L; | 50S RIBOSOMAL PROTEIN L22P, |
| | | | | | | | | | RIBOSOMAL PROTEIN L19; | HMAL22, HL23; 50S RIBOSOMAL |
| | | | | | | | | | CHAIN: M; RIBOSOMAL PROTEIN | PROTEIN L23P, HMAL23, HL25, L21; |
| | | | | | | | | | L21E; CHAIN: N; RIBOSOMAL | 50S RIBOSOMAL PROTEIN L24P, |
| | | | | | | | | | PROTEIN L22; CHAIN: O; | HMAL24, HL16, HL15; 50S |
| | | | | | | | | | RIBOSOMAL PROTEIN L23; | RIBOSOMAL PROTEIN L24E, |
| | | | | | | | | | CHAIN: P; RIBOSOMAL PROTEIN | HL21/HL22; 50S RIBOSOMAL |
| | | | | | | | | | L24; CHAIN: Q; RIBOSOMAL | PROTEIN L29P, HMAL29, HL33; 50S |
| | | | | | | | | | PROTEIN L24E; CHAIN: R; | RIBOSOMAL PROTEIN L30P, HMAL30, |
| | | | | | | | | | RIBOSOMAL PROTEIN L29; | HL20, HL16; 50S RIBOSOMAL |
| | | | | | | | | | CHAIN: S; RIBOSOMAL PROTEIN | PROTEIN L31E, L34, HL30; 50S |
| | | | | | | | | | L30; CHAIN: T; RIBOSOMAL | RIBOSOMAL PROTEIN L32E, HL5; 50S |
| | | | | | | | | | PROTEIN L31E; CHAIN: U; | RIBOSOMAL PROTEIN L37E, L35E; |
| | | | | | | | | | RIBOSOMAL PROTEIN L32E; | 50S RIBOSOMAL PROTEINS L39E, |
| | | | | | | | | | CHAIN: V; RIBOSOMAL PROTEIN | HL39E, HL46E; 50S RIBOSOMAL |
| | | | | | | | | | L37AE; CHAIN: W; RIBOSOMAL | PROTEIN L44E, LA, HLA; 50S |
| | | | | | | | | | PROTEIN L37E; CHAIN: X; | RIBOSOMAL PROTEIN L6P, HMAL6, |
| | | | | | | | | | RIBOSOMAL PROTEIN L39E; | HL10 RIBOSOME ASSEMBLY, RNA- |
| | | | | | | | | | CHAIN: Y; RIBOSOMAL PROTEIN | RNA, PROTEIN-RNA, PROTEIN- |
| | | | | | | | | | L44E; CHAIN: Z; RIBOSOMAL | PROTEIN |
| | | | | | | | | | PROTEIN L6; CHAIN: I; | |
| 302 | 1ahd | P | 143 | 208 | 1e−33 | −0.16 | 0.98 | | DNA-BINDING PROTEIN | |
| | | | | | | | | | ANTENNAPEDIA PROTEIN | |
| | | | | | | | | | (HOMEODOMAIN) MUTANT | |
| | | | | | | | | | WITH CYS 39 1AHD 3 REPLACED | |
| | | | | | | | | | BY SER (C39S) COMPLEX WITH | |
| | | | | | | | | | DNA (NMR, 1AHD 4.16 | |
| | | | | | | | | | STRUCTURES) 1AHD 5 | |
| 302 | 1ahd | P | 143 | 209 | 1e−33 | | | 72.79 | DNA-BINDING PROTEIN | |
| | | | | | | | | | ANTENNAPEDIA PROTEIN | |
| | | | | | | | | | (HOMEODOMAIN) MUTANT | |
| | | | | | | | | | WITH CYS 39 1AHD 3 REPLACED | |
| | | | | | | | | | BY SER (C39S) COMPLEX WITH | |
| | | | | | | | | | DNA (NMR, 1AHD 4.16 | |
| | | | | | | | | | STRUCTURES) 1AHD 5 | |
| 302 | 1b72 | A | 137 | 203 | 1.5e−30 | | | 69.28 | HOMEOBOX PROTEIN HOX-B1; | PROTEIN/DNA HOMEODOMAIN, |
| | | | | | | | | | CHAIN: A; PBX1; CHAIN: B; DNA | DNA, COMPLEX, DNA-BINDING |
| | | | | | | | | | CHAIN: D; DNA CHAIN: E; | PROTEIN, PROTEIN/DNA |
| 302 | 1b72 | A | 143 | 203 | 1.5e−30 | −0.07 | 0.99 | | HOMEOBOX PROTEIN HOX-B1; | PROTEIN/DNA HOMEODOMAIN, |
| | | | | | | | | | CHAIN: A; PBX1; CHAIN: B; DNA | DNA, COMPLEX, DNA-BINDING |
| | | | | | | | | | CHAIN: D; DNA CHAIN: E; | PROTEIN, PROTEIN/DNA |
| 302 | 1b72 | A | 147 | 204 | 1.7e−27 | −0.29 | 1.00 | | HOMEOBOX PROTEIN HOX-B1; | PROTEIN/DNA HOMEODOMAIN, |
| | | | | | | | | | CHAIN: A; PBX1; CHAIN: B; DNA | DNA, COMPLEX, DNA-BINDING |
| | | | | | | | | | CHAIN: D; DNA CHAIN: E; | PROTEIN, PROTEIN/DNA |
| 302 | 1b8i | A | 143 | 202 | 4.5e−30 | | | 61.07 | ULTRABITHORAX HOMEOTIC | TRANSCRIPTION/DNA |
| | | | | | | | | | PROTEIN IV; CHAIN: A; | ULTRABITHORAX; PBX PROTEIN; |
| | | | | | | | | | HOMEOBOX PROTEIN | DNA BINDING, HOMEODOMAIN, |
| | | | | | | | | | EXTRADENTICLE; CHAIN: B; DNA | HOMEOTIC PROTEINS, |
| | | | | | | | | | (5′-CHAIN: C; DNA (5′-CHAIN: D; | DEVELOPMENT, 2 SPECIFICITY |
| 302 | 1b8i | A | 144 | 201 | 4.5e−30 | 0.09 | 0.83 | | ULTRABITHORAX HOMEOTIC | TRANSCRIPTION/DNA |
| | | | | | | | | | PROTEIN IV; CHAIN: A; | ULTRABITHORAX; PBX PROTEIN; |
| | | | | | | | | | HOMEOBOX PROTEIN | DNA BINDING, HOMEODOMAIN, |
| | | | | | | | | | EXTRADENTICLE; CHAIN: B; DNA | HOMEOTIC PROTEINS, |
| | | | | | | | | | (5′-CHAIN: C; DNA (5′-CHAIN: D; | DEVELOPMENT, 2 SPECIFICITY |
| 302 | 1ftz | | 142 | 210 | 1.2e−28 | | | 71.20 | DNA-BINDING FUSHI TARAZU | |
| | | | | | | | | | PROTEIN (HOMEODOMAIN) | |
| | | | | | | | | | (NMR, 20 STRUCTURES) 1FTZ 3 | |
| 302 | 1ftz | | 144 | 208 | 1.2e−28 | −0.30 | 0.59 | | DNA-BINDING FUSHI TARAZU | |
| | | | | | | | | | PROTEIN (HOMEODOMAIN) | |
| | | | | | | | | | (NMR, 20 STRUCTURES) 1FTZ 3 | |
| 302 | 1san | | 148 | 209 | 3.4e−31 | | | 69.53 | DNA-BINDING PROTEIN | |
| | | | | | | | | | ANTENNAPEDIA PROTEIN | |
| | | | | | | | | | (HOMEODOMAIN) MUTANT | |
| | | | | | | | | | WITH CYS 39 1SAN 3 REPLACED | |
| | | | | | | | | | BY SER AND RESIDUES 1-6 | |
| | | | | | | | | | DELETED (C39S,DEL 1-6) 1SAN 4 | |
| | | | | | | | | | (NMR, 20 STRUCTURES) 1SAN 5 | |
| 302 | 1san | | 149 | 208 | 3.4e−31 | 0.00 | 1.00 | | DNA-BINDING PROTEIN | |
| | | | | | | | | | ANTENNAPEDIA PROTEIN | |
| | | | | | | | | | (HOMEODOMAIN) MUTANT | |
| | | | | | | | | | WITH CYS 39 1SAN 3 REPLACED | |
| | | | | | | | | | BY SER AND RESIDUES 1-6 | |
| | | | | | | | | | DELETED (C39S,DEL 1-6) 1SAN 4 | |
| | | | | | | | | | (NMR, 20 STRUCTURES) 1SAN 5 | |
| 302 | 9ant | A | 147 | 202 | 5.1e−31 | 0.38 | 1.00 | | ANTENNAPEDIA PROTEIN; | COMPLEX (DNA-BINDING |
| | | | | | | | | | CHAIN: A, B; DNA; CHAIN: C, D, E, | PROTEIN/DNA) HD; HOMEODOMAIN, |
| | | | | | | | | | F; | COMPLEX (DNA-BINDING |
| | | | | | | | | | | PROTEIN/DNA) |
| 302 | 9ant | A | 147 | 202 | 5.1e−31 | | | 68.47 | ANTENNAPEDIA PROTEIN; | COMPLEX (DNA-BINDING |
| | | | | | | | | | CHAIN: A, B; DNA; CHAIN: C, D, E, | PROTEIN/DNA) HD; HOMEODOMAIN, |
| | | | | | | | | | F; | COMPLEX (DNA-BINDING |
| | | | | | | | | | | PROTEIN/DNA) |
| 307 | 1ddv | A | 4 | 96 | 0.0003 | 0.48 | 0.46 | | GLGF-DOMAIN PROTEIN HOMER; | SIGNALING PROTEIN PROTEIN- |
| | | | | | | | | | CHAIN: A; METABOTROPIC | LIGAND COMPLEX, POLYPROLINE |
| | | | | | | | | | GLUTAMATE RECEPTOR | RECOGNITION, BETA TURN |
| | | | | | | | | | MGLUR5; CHAIN: B; | |
| 307 | 1ddw | A | 4 | 96 | 0.00015 | 0.62 | 0.69 | | GLGF-DOMAIN PROTEIN HOMER; | SIGNALING PROTEIN PLECKSTRIN |
| | | | | | | | | | CHAIN: A; | HOMOLOGY DOMAIN FOLD |
| 307 | 1rrp | B | 7 | 101 | 1.5e−25 | 0.57 | 0.96 | | RAN; CHAIN: A, C; NUCLEAR | COMPLEX (SMALL |
| | | | | | | | | | PORE COMPLEX PROTEIN | GTPASE/NUCLEAR PROTEIN) |
| | | | | | | | | | NUP358; CHAIN: B, D; | COMPLEX (SMALL |
| | | | | | | | | | | GTPASE/NUCLEAR PROTEIN), SMALL |
| | | | | | | | | | | GTPASE, 2 NUCLEAR TRANSPORT |
| 309 | 2ife | A | 159 | 237 | 1.2e−16 | 0.62 | 0.89 | | TRANSLATION INITIATION | GENE REGULATION INITIATION |
| | | | | | | | | | FACTOR IF3; CHAIN: A; | FACTOR |
| 310 | 1f5n | A | 107 | 167 | 0.0049 | −0.27 | 0.03 | | INTERFERON-INDUCED | SIGNALING PROTEIN GBP, GTP |
| | | | | | | | | | GUANYLATE-BINDING PROTEIN | HYDROLYSIS, GDP, GMP, |
| | | | | | | | | | 1; CHAIN: A; | INTERFERON INDUCED, DYNAMIN 2 |
| | | | | | | | | | | RELATED, LARGE GTPASE FAMILY, |
| | | | | | | | | | | GMPPNP, GPPNHP, |
| 310 | 1osm | A | 9 | 99 | 1.5e−15 | 1.73 | −0.20 | | OMPK36; CHAIN: A, B, C; | OUTER MEMBRANE PROTEIN |
| | | | | | | | | | | OSMOPORIN; OUTER MEMBRANE |
| | | | | | | | | | | PROTEIN, NON-SPECIFIC PORIN, |
| | | | | | | | | | | OSMOPORIN, 2 BETA-BARREL, |
| | | | | | | | | | | TRANSMEMBRANE |
| 310 | 1qq4 | A | 14 | 119 | 1.2e−11 | 1.84 | 0.04 | | ALPHA-LYTIC PROTEASE; | HYDROLASE DOUBLE BETA |
| | | | | | | | | | CHAIN: A; | BARREL, BACTERIAL SERINE |
| | | | | | | | | | | PROTEASE |
| 310 | 1qq4 | A | 8 | 96 | 3e−09 | 1.29 | −0.08 | | ALPHA-LYTIC PROTEASE; | HYDROLASE DOUBLE BETA |
| | | | | | | | | | CHAIN: A; | BARREL, BACTERIAL SERINE |
| | | | | | | | | | | PROTEASE |
| 310 | 1tal | | 14 | 119 | 1e−11 | 1.63 | −0.06 | | ALPHA-LYTIC PROTEASE; | SERINE PROTEASE SERINE |
| | | | | | | | | | CHAIN: NULL; | PROTEASE, LOW TEMPERATURE, |
| | | | | | | | | | | HYDROLASE, 2 SERINE PROTEINASE |
| 310 | 1tal | | 8 | 99 | 1.2e−10 | 1.03 | −0.20 | | ALPHA-LYTIC PROTEASE; | SERINE PROTEASE SERINE |
| | | | | | | | | | CHAIN: NULL; | PROTEASE, LOW TEMPERATURE, |
| | | | | | | | | | | HYDROLASE, 2 SERINE PROTEINASE |
| 311 | 1alh | A | 116 | 195 | 8.5e−18 | −0.02 | 0.27 | | QGSR ZINC FINGER PEPTIDE; | COMPLEX (ZINC FINGER/DNA) |
| | | | | | | | | | CHAIN: A; DUPLEX | COMPLEX (ZINC FINGER/DNA), ZINC |
| | | | | | | | | | OLIGONUCLEOTIDE BINDING | FINGER, DNA-BINDING PROTEIN |
| | | | | | | | | | SITE; CHAIN: B, C; | |
| 311 | 1alh | A | 339 | 448 | 1.2e−39 | −0.24 | 0.11 | | QGSR ZINC FINGER PEPTIDE; | COMPLEX (ZINC FINGER/DNA) |
| | | | | | | | | | CHAIN: A; DUPLEX | COMPLEX (ZINC FINGER/DNA), ZINC |
| | | | | | | | | | OLIGONUCLEOTIDE BINDING | FINGER, DNA-BINDING PROTEIN |
| | | | | | | | | | SITE; CHAIN: B, C; | |
| 311 | 1alh | A | 619 | 728 | 6e−37 | −0.46 | 0.12 | | QGSR ZINC FINGER PEPTIDE; | COMPLEX (ZINC FINGER/DNA) |
| | | | | | | | | | CHAIN: A; DUPLEX | COMPLEX (ZINC FINGER/DNA), ZINC |
| | | | | | | | | | OLIGONUCLEOTIDE BINDING | FINGER, DNA-BINDING PROTEIN |
| | | | | | | | | | SITE; CHAIN: B, C; | |
| 311 | 1mey | C | 105 | 195 | 3.4e−32 | −0.06 | 0.22 | | DNA; CHAIN: A, B, D, E; | COMPLEX (ZINC FINGER/DNA) ZINC |
| | | | | | | | | | CONSENSUS ZINC FINGER | FINGER, PROTEIN-DNA |
| | | | | | | | | | PROTEIN; CHAIN: C, F, G; | INTERACTION, PROTEIN DESIGN, 2 |
| | | | | | | | | | | CRYSTAL STRUCTURE, COMPLEX |
| | | | | | | | | | | (ZINC FINGER/DNA) |
| 311 | 1mey | C | 142 | 223 | 1.7e−39 | −0.08 | 0.95 | | DNA; CHAIN: A, B, D, E; | COMPLEX (ZINC FINGER/DNA) ZINC |
| | | | | | | | | | CONSENSUS ZINC FINGER | FINGER, PROTEIN-DNA |
| | | | | | | | | | PROTEIN; CHAIN: C, F, G; | INTERACTION, PROTEIN DESIGN, 2 |
| | | | | | | | | | | CRYSTAL STRUCTURE, COMPLEX |
| | | | | | | | | | | (ZINC FINGER/DNA) |
| 311 | 1mey | C | 170 | 251 | 1.7e−42 | 0.19 | 1.00 | | DNA; CHAIN: A, B, D, E; | COMPLEX (ZINC FINGER/DNA) ZINC |
| | | | | | | | | | CONSENSUS ZINC FINGER | FINGER, PROTEIN-DNA |
| | | | | | | | | | PROTEIN; CHAIN: C, F, G; | INTERACTION, PROTEIN DESIGN, 2 |
| | | | | | | | | | | CRYSTAL STRUCTURE, COMPLEX |
| | | | | | | | | | | (ZINC FINGER/DNA) |
| 311 | 1mey | C | 198 | 279 | 1.2e−44 | 0.17 | 0.99 | | DNA; CHAIN: A, B, D, E; | COMPLEX (ZINC FINGER/DNA) ZINC |
| | | | | | | | | | CONSENSUS ZINC FINGER | FINGER, PROTEIN-DNA |
| | | | | | | | | | PROTEIN; CHAIN: C, F, G; | INTERACTION, PROTEIN DESIGN, 2 |
| | | | | | | | | | | CRYSTAL STRUCTURE, COMPLEX |
| | | | | | | | | | | (ZINC FINGER/DNA) |
| 311 | 1mey | C | 226 | 307 | 3.4e−46 | 0.27 | 1.00 | | DNA; CHAIN: A, B, D, E; | COMPLEX (ZINC FINGER/DNA) ZINC |
| | | | | | | | | | CONSENSUS ZINC FINGER | FINGER, PROTEIN-DNA |
| | | | | | | | | | PROTEIN; CHAIN: C, F, G; | INTERACTION, PROTEIN DESIGN, 2 |
| | | | | | | | | | | CRYSTAL STRUCTURE, COMPLEX |
| | | | | | | | | | | (ZINC FINGER/DNA) |
| 311 | 1mey | C | 254 | 335 | 1.7e−46 | −0.02 | 0.99 | | DNA; CHAIN: A, B, D, E; | COMPLEX (ZINC FINGER/DNA) ZINC |
| | | | | | | | | | CONSENSUS ZINC FINGER | FINGER, PROTEIN-DNA |
| | | | | | | | | | PROTEIN; CHAIN: C, F, G; | INTERACTION, PROTEIN DESIGN, 2 |
| | | | | | | | | | | CRYSTAL STRUCTURE, COMPLEX |
| | | | | | | | | | | (ZINC FINGER/DNA) |
| 311 | 1mey | C | 282 | 363 | 8.5e−47 | −0.26 | 1.00 | | DNA; CHAIN: A, B, D, E; | COMPLEX (ZINC FINGER/DNA) ZINC |
| | | | | | | | | | CONSENSUS ZINC FINGER | FINGER, PROTEIN-DNA |
| | | | | | | | | | PROTEIN; CHAIN: C, F, G; | INTERACTION, PROTEIN DESIGN, 2 |
| | | | | | | | | | | CRYSTAL STRUCTURE, COMPLEX |
| | | | | | | | | | | (ZINC FINGER/DNA) |
| 311 | 1mey | C | 310 | 391 | 1.5e−46 | −0.08 | 0.99 | | DNA; CHAIN: A, B, D, E; | COMPLEX (ZINC FINGER/DNA) ZINC |
| | | | | | | | | | CONSENSUS ZINC FINGER | FINGER, PROTEIN-DNA |
| | | | | | | | | | PROTEIN; CHAIN: C, F, G; | INTERACTION, PROTEIN DESIGN, 2 |
| | | | | | | | | | | CRYSTAL STRUCTURE, COMPLEX |
| | | | | | | | | | | (ZINC FINGER/DNA) |
| 311 | 1mey | C | 338 | 419 | 1.7e−46 | 0.07 | 0.98 | | DNA; CHAIN: A, B, D, E; | COMPLEX (ZINC FINGER/DNA) ZINC |
| | | | | | | | | | CONSENSUS ZINC FINGER | FINGER, PROTEIN-DNA |
| | | | | | | | | | PROTEIN; CHAIN: C, F, G; | INTERACTION, PROTEIN DESIGN, 2 |
| | | | | | | | | | | CRYSTAL STRUCTURE, COMPLEX |
| | | | | | | | | | | (ZINC FINGER/DNA) |
| 311 | 1mey | C | 366 | 447 | 3.4e−47 | 0.08 | 1.00 | | DNA; CHAIN: A, B, D, E; | COMPLEX (ZINC FINGER/DNA) ZINC |
| | | | | | | | | | CONSENSUS ZINC FINGER | FINGER, PROTEIN-DNA |
| | | | | | | | | | PROTEIN; CHAIN: C, F, G; | INTERACTION, PROTEIN DESIGN, 2 |
| | | | | | | | | | | CRYSTAL STRUCTURE, COMPLEX |
| | | | | | | | | | | (ZINC FINGER/DNA) |
| 311 | 1mey | C | 394 | 475 | 6.8e−49 | 0.32 | 1.00 | | DNA; CHAIN: A, B, D, E; | COMPLEX (ZINC FINGER/DNA) ZINC |
| | | | | | | | | | CONSENSUS ZINC FINGER | FINGER, PROTEIN-DNA |
| | | | | | | | | | PROTEIN; CHAIN: C, F, G; | INTERACTION, PROTEIN DESIGN, 2 |
| | | | | | | | | | | CRYSTAL STRUCTURE, COMPLEX |
| | | | | | | | | | | (ZINC FINGER/DNA) |
| 311 | 1mey | C | 422 | 503 | 1e−49 | 0.06 | 1.00 | | DNA; CHAIN: A, B, D, E; | COMPLEX (ZINC FINGER/DNA) ZINC |
| | | | | | | | | | CONSENSUS ZINC FINGER | FINGER, PROTEIN-DNA |
| | | | | | | | | | PROTEIN; CHAIN: C, F, G; | INTERACTION, PROTEIN DESIGN, 2 |
| | | | | | | | | | | CRYSTAL STRUCTURE, COMPLEX |
| | | | | | | | | | | (ZINC FINGER/DNA) |
| 311 | 1mey | C | 450 | 531 | 3.4e−49 | 0.18 | 1.00 | | DNA; CHAIN: A, B, D, E; | COMPLEX (ZINC FINGER/DNA) ZINC |
| | | | | | | | | | CONSENSUS ZINC FINGER | FINGER, PROTEIN-DNA |
| | | | | | | | | | PROTEIN; CHAIN: C, F, G; | INTERACTION, PROTEIN DESIGN, 2 |
| | | | | | | | | | | CRYSTAL STRUCTURE, COMPLEX |
| | | | | | | | | | | (ZINC FINGER/DNA) |
| 311 | 1mey | C | 478 | 559 | 1.2e−48 | 0.37 | 1.00 | | DNA; CHAIN: A, B, D, E; | COMPLEX (ZINC FINGER/DNA) ZINC |
| | | | | | | | | | CONSENSUS ZINC FINGER | FINGER, PROTEIN-DNA |
| | | | | | | | | | PROTEIN; CHAIN: C, F, G; | INTERACTION, PROTEIN DESIGN, 2 |
| | | | | | | | | | | CRYSTAL STRUCTURE, COMPLEX |
| | | | | | | | | | | (ZINC FINGER/DNA) |
| 311 | 1mey | C | 478 | 560 | 3.4e−49 | | | 108.14 | DNA; CHAIN: A, B, D, E; | COMPLEX (ZINC FINGER/DNA) ZINC |
| | | | | | | | | | CONSENSUS ZINC FINGER | FINGER, PROTEIN-DNA |
| | | | | | | | | | PROTEIN; CHAIN: C, F, G; | INTERACTION, PROTEIN DESIGN, 2 |
| | | | | | | | | | | CRYSTAL STRUCTURE, COMPLEX |
| | | | | | | | | | | (ZINC FINGER/DNA) |
| 311 | 1mey | C | 506 | 587 | 8.5e−49 | 0.14 | 1.00 | | DNA; CHAIN: A, B, D, E; | COMPLEX (ZINC FINGER/DNA) ZINC |
| | | | | | | | | | CONSENSUS ZINC FINGER | FINGER, PROTEIN-DNA |
| | | | | | | | | | PROTEIN; CHAIN: C, F, G; | INTERACTION, PROTEIN DESIGN, 2 |
| | | | | | | | | | | CRYSTAL STRUCTURE, COMPLEX |
| | | | | | | | | | | (ZINC FINGER/DNA) |
| 311 | 1mey | C | 534 | 615 | 1.5e−48 | 0.14 | 0.99 | | DNA; CHAIN: A, B, D, E; | COMPLEX (ZINC FINGER/DNA) ZINC |
| | | | | | | | | | CONSENSUS ZINC FINGER | FINGER, PROTEIN-DNA |
| | | | | | | | | | PROTEIN; CHAIN: C, F, G; | INTERACTION, PROTEIN DESIGN, 2 |
| | | | | | | | | | | CRYSTAL STRUCTURE, COMPLEX |
| | | | | | | | | | | (ZINC FINGER/DNA) |
| 311 | 1mey | C | 562 | 643 | 6.8e−49 | −0.00 | 1.00 | | DNA; CHAIN: A, B, D, E; | COMPLEX (ZINC FINGER/DNA) ZINC |
| | | | | | | | | | CONSENSUS ZINC FINGER | FINGER, PROTEIN-DNA |
| | | | | | | | | | PROTEIN; CHAIN: C, F, G; | INTERACTION, PROTEIN DESIGN, 2 |
| | | | | | | | | | | CRYSTAL STRUCTURE, COMPLEX |
| | | | | | | | | | | (ZINC FINGER/DNA) |
| 311 | 1mey | C | 590 | 671 | 6.8e−49 | 0.04 | 0.82 | | DNA; CHAIN: A, B, D, E; | COMPLEX (ZINC FINGER/DNA) ZINC |
| | | | | | | | | | CONSENSUS ZINC FINGER | FINGER, PROTEIN-DNA |
| | | | | | | | | | PROTEIN; CHAIN: C, F, G; | INTERACTION, PROTEIN DESIGN, 2 |
| | | | | | | | | | | CRYSTAL STRUCTURE, COMPLEX |
| | | | | | | | | | | (ZINC FINGER/DNA) |
| 311 | 1mey | C | 618 | 699 | 1.7e−49 | −0.22 | 0.94 | | DNA; CHAIN: A, B, D, E; | COMPLEX (ZINC FINGER/DNA) ZINC |
| | | | | | | | | | CONSENSUS ZINC FINGER | FINGER, PROTEIN-DNA |
| | | | | | | | | | PROTEIN; CHAIN: C, F, G; | INTERACTION, PROTEIN DESIGN, 2 |
| | | | | | | | | | | CRYSTAL STRUCTURE, COMPLEX |
| | | | | | | | | | | (ZINC FINGER/DNA) |
| 311 | 1mey | C | 646 | 727 | 1.2e−50 | −0.03 | 0.98 | | DNA; CHAIN: A, B, D, E; | COMPLEX (ZINC FINGER/DNA) ZINC |
| | | | | | | | | | CONSENSUS ZINC FINGER | FINGER, PROTEIN-DNA |
| | | | | | | | | | PROTEIN; CHAIN: C, F, G; | INTERACTION, PROTEIN DESIGN, 2 |
| | | | | | | | | | | CRYSTAL STRUCTURE, COMPLEX |
| | | | | | | | | | | (ZINC FINGER/DNA) |
| 311 | 1mey | C | 674 | 755 | 1.2e−50 | 0.23 | 1.00 | | DNA; CHAIN: A, B, D, E; | COMPLEX (ZINC FINGER/DNA) ZINC |
| | | | | | | | | | CONSENSUS ZINC FINGER | FINGER, PROTEIN-DNA |
| | | | | | | | | | PROTEIN; CHAIN: C, F, G; | INTERACTION, PROTEIN DESIGN, 2 |
| | | | | | | | | | | CRYSTAL STRUCTURE, COMPLEX |
| | | | | | | | | | | (ZINC FINGER/DNA) |
| 311 | 1mey | C | 702 | 783 | 6.8e−51 | 0.31 | 1.00 | | DNA; CHAIN: A, B, D, E; | COMPLEX (ZINC FINGER/DNA) ZINC |
| | | | | | | | | | CONSENSUS ZINC FINGER | FINGER, PROTEIN-DNA |
| | | | | | | | | | PROTEIN; CHAIN: C, F, G; | INTERACTION, PROTEIN DESIGN, 2 |
| | | | | | | | | | | CRYSTAL STRUCTURE, COMPLEX |
| | | | | | | | | | | (ZINC FINGER/DNA) |
| 311 | 1mey | C | 730 | 811 | 3.4e−50 | 0.08 | 1.00 | | DNA; CHAIN: A, B, D, E; | COMPLEX (ZINC FINGER/DNA) ZINC |
| | | | | | | | | | CONSENSUS ZINC FINGER | FINGER, PROTEIN-DNA |
| | | | | | | | | | PROTEIN; CHAIN: C, F, G; | INTERACTION, PROTEIN DESIGN, 2 |
| | | | | | | | | | | CRYSTAL STRUCTURE, COMPLEX |
| | | | | | | | | | | (ZINC FINGER/DNA) |
| 311 | 1mey | C | 758 | 839 | 1.7e−50 | −0.03 | 1.00 | | DNA; CHAIN: A, B, D, E; | COMPLEX (ZINC FINGER/DNA) ZINC |
| | | | | | | | | | CONSENSUS ZINC FINGER | FINGER, PROTEIN-DNA |
| | | | | | | | | | PROTEIN; CHAIN: C, F, G; | INTERACTION, PROTEIN DESIGN, 2 |
| | | | | | | | | | | CRYSTAL STRUCTURE, COMPLEX |
| | | | | | | | | | | (ZINC FINGER/DNA) |
| 311 | 1mey | C | 786 | 852 | 1.5e−40 | −0.09 | 1.00 | | DNA; CHAIN: A, B, D, E; | COMPLEX (ZINC FINGER/DNA) ZINC |
| | | | | | | | | | CONSENSUS ZINC FINGER | FINGER, PROTEIN-DNA |
| | | | | | | | | | PROTEIN; CHAIN: C, F, G; | INTERACTION, PROTEIN DESIGN, 2 |
| | | | | | | | | | | CRYSTAL STRUCTURE, COMPLEX |
| | | | | | | | | | | (ZINC FINGER/DNA) |
| 311 | 1tf6 | A | 199 | 345 | 1.7e−34 | 0.00 | 0.98 | | TFIIIA; CHAIN: A, D; 5S | COMPLEX (TRANSCRIPTION |
| | | | | | | | | | RIBOSOMAL RNA GENE; CHAIN: | REGULATION/DNA) COMPLEX |
| | | | | | | | | | B, C, E, F; | (TRANSCRIPTION |
| | | | | | | | | | | REGULATION/DNA), RNA |
| | | | | | | | | | | POLYMERASE III, 2 TRANSCRIPTION |
| | | | | | | | | | | INITIATION, ZINC FINGER PROTEIN |
| 311 | 1tf6 | A | 394 | 560 | 1.7e−37 | | | 116.05 | TFIIIA; CHAIN: A, D; 5S | COMPLEX (TRANSCRIPTION |
| | | | | | | | | | RIBOSOMAL RNA GENE; CHAIN: | REGULATION/DNA) COMPLEX |
| | | | | | | | | | B, C, E, F; | (TRANSCRIPTION |
| | | | | | | | | | | REGULATION/DNA), RNA |
| | | | | | | | | | | POLYMERASE III, 2 TRANSCRIPTION |
| | | | | | | | | | | INITIATION, ZINC FINGER PROTEIN |
| 311 | 1tf6 | A | 395 | 540 | 1.7e−37 | 0.21 | 0.88 | | TFIIIA; CHAIN: A, D; 5S | COMPLEX (TRANSCRIPTION |
| | | | | | | | | | RIBOSOMAL RNA GENE; CHAIN: | REGULATION/DNA) COMPLEX |
| | | | | | | | | | B, C, E, F; | (TRANSCRIPTION |
| | | | | | | | | | | REGULATION/DNA), RNA |
| | | | | | | | | | | POLYMERASE III, 2 TRANSCRIPTION |
| | | | | | | | | | | INITIATION, ZINC FINGER PROTEIN |
| 311 | 1tf6 | A | 507 | 652 | 3.4e−36 | −0.03 | 0.48 | | TFIIIA; CHAIN: A, D; 5S | COMPLEX (TRANSCRIPTION |
| | | | | | | | | | RIBOSOMAL RNA GENE; CHAIN: | REGULATION/DNA) COMPLEX |
| | | | | | | | | | B, C, E, F; | (TRANSCRIPTION |
| | | | | | | | | | | REGULATION/DNA), RNA |
| | | | | | | | | | | POLYMERASE III, 2 TRANSCRIPTION |
| | | | | | | | | | | INITIATION, ZINC FINGER PROTEIN |
| 311 | 1tf6 | A | 563 | 708 | 1.4e−36 | −0.36 | 0.45 | | TFIIIA; CHAIN: A, D; 5S | COMPLEX (TRANSCRIPTION |
| | | | | | | | | | RIBOSOMAL RNA GENE; CHAIN: | REGULATION/DNA) COMPLEX |
| | | | | | | | | | B, C, E, F; | (TRANSCRIPTION |
| | | | | | | | | | | REGULATION/DNA), RNA |
| | | | | | | | | | | POLYMERASE III, 2 TRANSCRIPTION |
| | | | | | | | | | | INITIATION, ZINC FINGER PROTEIN |
| 311 | 1tf6 | A | 619 | 764 | 1.4e−36 | −0.22 | 0.46 | | TFIIIA; CHAIN: A, D; 5S | COMPLEX (TRANSCRIPTION |
| | | | | | | | | | RIBOSOMAL RNA GENE; CHAIN: | REGULATION/DNA) COMPLEX |
| | | | | | | | | | B, C, E, F; | (TRANSCRIPTION |
| | | | | | | | | | | REGULATION/DNA), RNA |
| | | | | | | | | | | POLYMERASE III, 2 TRANSCRIPTION |
| | | | | | | | | | | INITIATION, ZINC FINGER PROTEIN |
| 311 | 1tf6 | A | 703 | 852 | 6.8e−38 | 0.19 | 0.98 | | TFIIIA; CHAIN: A, D; 5S | COMPLEX (TRANSCRIPTION |
| | | | | | | | | | RIBOSOMAL RNA GENE; CHAIN: | REGULATION/DNA) COMPLEX |
| | | | | | | | | | B, C, E, F; | (TRANSCRIPTION |
| | | | | | | | | | | REGULATION/DNA), RNA |
| | | | | | | | | | | POLYMERASE III, 2 TRANSCRIPTION |
| | | | | | | | | | | INITIATION, ZINC FINGER PROTEIN |
| 311 | 1ubd | C | 116 | 223 | 5.1e−25 | −0.02 | 0.86 | | YY1; CHAIN: C; ADENO- | COMPLEX (TRANSCRIPTION |
| | | | | | | | | | ASSOCIATED VIRUS P5 | REGULATION/DNA) YING-YANG 1; |
| | | | | | | | | | INITIATOR ELEMENT DNA; | TRANSCRIPTION INITIATION, |
| | | | | | | | | | CHAIN: A, B; | INITIATOR ELEMENT, YY1, ZINC 2 |
| | | | | | | | | | | FINGER PROTEIN, DNA-PROTEIN |
| | | | | | | | | | | RECOGNITION, 3 COMPLEX |
| | | | | | | | | | | (TRANSCRIPTION |
| | | | | | | | | | | REGULATION/DNA) |
| 311 | 1ubd | C | 147 | 251 | 1.5e−41 | −0.11 | 0.94 | | YY1; CHAIN: C; ADENO- | COMPLEX (TRANSCRIPTION |
| | | | | | | | | | ASSOCIATED VIRUS P5 | REGULATION/DNA) YING-YANG 1; |
| | | | | | | | | | INITIATOR ELEMENT DNA; | TRANSCRIPTION INITIATION, |
| | | | | | | | | | CHAIN: A, B; | INITIATOR ELEMENT, YY1, ZINC 2 |
| | | | | | | | | | | FINGER PROTEIN, DNA-PROTEIN |
| | | | | | | | | | | RECOGNITION, 3 COMPLEX |
| | | | | | | | | | | (TRANSCRIPTION |
| | | | | | | | | | | REGULATION/DNA) |
| 311 | 1ubd | C | 168 | 279 | 6e−51 | −0.09 | 0.66 | | YY1; CHAIN: C; ADENO- | COMPLEX (TRANSCRIPTION |
| | | | | | | | | | ASSOCIATED VIRUS P5 | REGULATION/DNA) YING-YANG 1; |
| | | | | | | | | | INITIATOR ELEMENT DNA; | TRANSCRIPTION INITIATION, |
| | | | | | | | | | CHAIN: A, B; | INITIATOR ELEMENT, YY1, ZINC 2 |
| | | | | | | | | | | FINGER PROTEIN, DNA-PROTEIN |
| | | | | | | | | | | RECOGNITION, 3 COMPLEX |
| | | | | | | | | | | (TRANSCRIPTION |
| | | | | | | | | | | REGULATION/DNA) |
| 311 | 1ubd | C | 201 | 307 | 8.5e−32 | 0.06 | 1.00 | | YY1; CHAIN: C; ADENO- | COMPLEX (TRANSCRIPTION |
| | | | | | | | | | ASSOCIATED VIRUS P5 | REGULATION/DNA) YING-YANG 1; |
| | | | | | | | | | INITIATOR ELEMENT DNA; | TRANSCRIPTION INITIATION, |
| | | | | | | | | | CHAIN: A, B; | INITIATOR ELEMENT, YY1, ZINC 2 |
| | | | | | | | | | | FINGER PROTEIN, DNA-PROTEIN |
| | | | | | | | | | | RECOGNITION, 3 COMPLEX |
| | | | | | | | | | | (TRANSCRIPTION |
| | | | | | | | | | | REGULATION/DNA) |
| 311 | 1ubd | C | 203 | 307 | 6e−53 | −0.15 | 0.93 | | YY1; CHAIN: C; ADENO- | COMPLEX (TRANSCRIPTION |
| | | | | | | | | | ASSOCIATED VIRUS P5 | REGULATION/DNA) YING-YANG 1; |
| | | | | | | | | | INITIATOR ELEMENT DNA; | TRANSCRIPTION INITIATION, |
| | | | | | | | | | CHAIN: A, B; | INITIATOR ELEMENT, YY1, ZINC 2 |
| | | | | | | | | | | FINGER PROTEIN, DNA-PROTEIN |
| | | | | | | | | | | RECOGNITION, 3 COMPLEX |
| | | | | | | | | | | (TRANSCRIPTION |
| | | | | | | | | | | REGULATION/DNA) |
| 311 | 1ubd | C | 224 | 336 | 3e−52 | −0.10 | 0.72 | | YY1; CHAIN: C; ADENO- | COMPLEX (TRANSCRIPTION |
| | | | | | | | | | ASSOCIATED VIRUS P5 | REGULATION/DNA) YING-YANG 1; |
| | | | | | | | | | INITIATOR ELEMENT DNA; | TRANSCRIPTION INITIATION, |
| | | | | | | | | | CHAIN: A, B; | INITIATOR ELEMENT, YY1, ZINC 2 |
| | | | | | | | | | | FINGER PROTEIN, DNA-PROTEIN |
| | | | | | | | | | | RECOGNITION, 3 COMPLEX |
| | | | | | | | | | | (TRANSCRIPTION |
| | | | | | | | | | | REGULATION/DNA) |
| 311 | 1ubd | C | 308 | 447 | 1.5e−48 | −0.40 | 0.54 | | YY1; CHAIN: C; ADENO- | COMPLEX (TRANSCRIPTION |
| | | | | | | | | | ASSOCIATED VIRUS P5 | REGULATION/DNA) YING-YANG 1; |
| | | | | | | | | | INITIATOR ELEMENT DNA; | TRANSCRIPTION INITIATION, |
| | | | | | | | | | CHAIN: A, B; | INITIATOR ELEMENT, YY1, ZINC 2 |
| | | | | | | | | | | FINGER PROTEIN, DNA-PROTEIN |
| | | | | | | | | | | RECOGNITION, 3 COMPLEX |
| | | | | | | | | | | (TRANSCRIPTION |
| | | | | | | | | | | REGULATION/DNA) |
| 311 | 1ubd | C | 371 | 476 | 3e−50 | −0.17 | 0.86 | | YY1; CHAIN: C; ADENO- | COMPLEX (TRANSCRIPTION |
| | | | | | | | | | ASSOCIATED VIRUS P5 | REGULATION/DNA) YING-YANG 1; |
| | | | | | | | | | INITIATOR ELEMENT DNA; | TRANSCRIPTION INITIATION, |
| | | | | | | | | | CHAIN: A, B; | INITIATOR ELEMENT, YY1, ZINC 2 |
| | | | | | | | | | | FINGER PROTEIN, DNA-PROTEIN |
| | | | | | | | | | | RECOGNITION, 3 COMPLEX |
| | | | | | | | | | | (TRANSCRIPTION |
| | | | | | | | | | | REGULATION/DNA) |
| 311 | 1ubd | C | 374 | 475 | 1e−34 | −0.10 | 0.80 | | YY1; CHAIN: C; ADENO- | COMPLEX (TRANSCRIPTION |
| | | | | | | | | | ASSOCIATED VIRUS P5 | REGULATION/DNA) YING-YANG 1; |
| | | | | | | | | | INITIATOR ELEMENT DNA; | TRANSCRIPTION INITIATION, |
| | | | | | | | | | CHAIN: A, B; | INITIATOR ELEMENT, YY1, ZINC 2 |
| | | | | | | | | | | FINGER PROTEIN, DNA-PROTEIN |
| | | | | | | | | | | RECOGNITION, 3 COMPLEX |
| | | | | | | | | | | (TRANSCRIPTION |
| | | | | | | | | | | REGULATION/DNA) |
| 311 | 1ubd | C | 394 | 503 | 1.5e−54 | −0.13 | 0.69 | | YY1; CHAIN: C; ADENO- | COMPLEX (TRANSCRIPTION |
| | | | | | | | | | ASSOCIATED VIRUS P5 | REGULATION/DNA) YING-YANG 1; |
| | | | | | | | | | INITIATOR ELEMENT DNA; | TRANSCRIPTION INITIATION, |
| | | | | | | | | | CHAIN: A, B; | INITIATOR ELEMENT, YY1, ZINC 2 |
| | | | | | | | | | | FINGER PROTEIN, DNA-PROTEIN |
| | | | | | | | | | | RECOGNITION, 3 COMPLEX |
| | | | | | | | | | | (TRANSCRIPTION |
| | | | | | | | | | | REGULATION/DNA) |
| 311 | 1ubd | C | 420 | 559 | 7.5e−57 | −0.17 | 0.46 | | YY1; CHAIN: C; ADENO- | COMPLEX (TRANSCRIPTION |
| | | | | | | | | | ASSOCIATED VIRUS P5 | REGULATION/DNA) YING-YANG 1; |
| | | | | | | | | | INITIATOR ELEMENT DNA; | TRANSCRIPTION INITIATION, |
| | | | | | | | | | CHAIN: A, B; | INITIATOR ELEMENT, YY1, ZINC 2 |
| | | | | | | | | | | FINGER PROTEIN, DNA-PROTEIN |
| | | | | | | | | | | RECOGNITION, 3 COMPLEX |
| | | | | | | | | | | (TRANSCRIPTION |
| | | | | | | | | | | REGULATION/DNA) |
| 311 | 1ubd | C | 430 | 531 | 1.7e−34 | 0.22 | 0.98 | | YY1; CHAIN: C; ADENO- | COMPLEX (TRANSCRIPTION |
| | | | | | | | | | ASSOCIATED VIRUS P5 | REGULATION/DNA) YING-YANG 1; |
| | | | | | | | | | INITIATOR ELEMENT DNA; | TRANSCRIPTION INITIATION, |
| | | | | | | | | | CHAIN: A, B; | INITIATOR ELEMENT, YY1, ZINC 2 |
| | | | | | | | | | | FINGER PROTEIN, DNA-PROTEIN |
| | | | | | | | | | | RECOGNITION, 3 COMPLEX |
| | | | | | | | | | | (TRANSCRIPTION |
| | | | | | | | | | | REGULATION/DNA) |
| 311 | 1ubd | C | 458 | 559 | 1.7e−33 | −0.07 | 0.93 | | YY1; CHAIN: C; ADENO- | COMPLEX (TRANSCRIPTION |
| | | | | | | | | | ASSOCIATED VIRUS P5 | REGULATION/DNA) YING-YANG 1; |
| | | | | | | | | | INITIATOR ELEMENT DNA; | TRANSCRIPTION INITIATION, |
| | | | | | | | | | CHAIN: A, B; | INITIATOR ELEMENT, YY1, ZINC 2 |
| | | | | | | | | | | FINGER PROTEIN, DNA-PROTEIN |
| | | | | | | | | | | RECOGNITION, 3 COMPLEX |
| | | | | | | | | | | (TRANSCRIPTION |
| | | | | | | | | | | REGULATION/DNA) |
| 311 | 1ubd | C | 504 | 615 | 1.3e−51 | 0.16 | 0.80 | | YY1; CHAIN: C; ADENO- | COMPLEX (TRANSCRIPTION |
| | | | | | | | | | ASSOCIATED VIRUS P5 | REGULATION/DNA) YING-YANG 1; |
| | | | | | | | | | INITIATOR ELEMENT DNA; | TRANSCRIPTION INITIATION, |
| | | | | | | | | | CHAIN: A, B; | INITIATOR ELEMENT, YY1, ZINC 2 |
| | | | | | | | | | | FINGER PROTEIN, DNA-PROTEIN |
| | | | | | | | | | | RECOGNITION, 3 COMPLEX |
| | | | | | | | | | | (TRANSCRIPTION |
| | | | | | | | | | | REGULATION/DNA) |
| 311 | 1ubd | C | 598 | 699 | 1.7e−34 | −0.42 | 0.21 | | YY1; CHAIN: C; ADENO- | COMPLEX (TRANSCRIPTION |
| | | | | | | | | | ASSOCIATED VIRUS P5 | REGULATION/DNA) YING-YANG 1; |
| | | | | | | | | | INITIATOR ELEMENT DNA; | TRANSCRIPTION INITIATION, |
| | | | | | | | | | CHAIN: A, B; | INITIATOR ELEMENT, YY1, ZINC 2 |
| | | | | | | | | | | FINGER PROTEIN, DNA-PROTEIN |
| | | | | | | | | | | RECOGNITION, 3 COMPLEX |
| | | | | | | | | | | (TRANSCRIPTION |
| | | | | | | | | | | REGULATION/DNA) |
| 311 | 1ubd | C | 616 | 755 | 3e−49 | −0.41 | 0.21 | | YY1; CHAIN: C; ADENO- | COMPLEX (TRANSCRIPTION |
| | | | | | | | | | ASSOCIATED VIRUS P5 | REGULATION/DNA) YING-YANG 1; |
| | | | | | | | | | INITIATOR ELEMENT DNA; | TRANSCRIPTION INITIATION, |
| | | | | | | | | | CHAIN: A, B; | INITIATOR ELEMENT, YY1, ZINC 2 |
| | | | | | | | | | | FINGER PROTEIN, DNA-PROTEIN |
| | | | | | | | | | | RECOGNITION, 3 COMPLEX |
| | | | | | | | | | | (TRANSCRIPTION |
| | | | | | | | | | | REGULATION/DNA) |
| 311 | 1ubd | C | 626 | 727 | 1.7e−34 | −0.33 | 0.45 | | YY1; CHAIN: C; ADENO- | COMPLEX (TRANSCRIPTION |
| | | | | | | | | | ASSOCIATED VIRUS P5 | REGULATION/DNA) YING-YANG 1; |
| | | | | | | | | | INITIATOR ELEMENT DNA; | TRANSCRIPTION INITIATION, |
| | | | | | | | | | CHAIN: A, B; | INITIATOR ELEMENT, YY1, ZINC 2 |
| | | | | | | | | | | FINGER PROTEIN, DNA-PROTEIN |
| | | | | | | | | | | RECOGNITION, 3 COMPLEX |
| | | | | | | | | | | (TRANSCRIPTION |
| | | | | | | | | | | REGULATION/DNA) |
| 311 | 1ubd | C | 672 | 784 | 3e−57 | | | 93.95 | YY1; CHAIN: C; ADENO- | COMPLEX (TRANSCRIPTION |
| | | | | | | | | | ASSOCIATED VIRUS P5 | REGULATION/DNA) YING-YANG 1; |
| | | | | | | | | | INITIATOR ELEMENT DNA; | TRANSCRIPTION INITIATION, |
| | | | | | | | | | CHAIN: A, B; | INITIATOR ELEMENT, YY1, ZINC 2 |
| | | | | | | | | | | FINGER PROTEIN, DNA-PROTEIN |
| | | | | | | | | | | RECOGNITION, 3 COMPLEX |
| | | | | | | | | | | (TRANSCRIPTION |
| | | | | | | | | | | REGULATION/DNA) |
| 311 | 1ubd | C | 682 | 783 | 1.7e−34 | −0.02 | 0.89 | | YY1; CHAIN: C; ADENO- | COMPLEX (TRANSCRIPTION |
| | | | | | | | | | ASSOCIATED VIRUS P5 | REGULATION/DNA) YING-YANG 1; |
| | | | | | | | | | INITIATOR ELEMENT DNA; | TRANSCRIPTION INITIATION, |
| | | | | | | | | | CHAIN: A, B; | INITIATOR ELEMENT, YY1, ZINC 2 |
| | | | | | | | | | | FINGER PROTEIN, DNA-PROTEIN |
| | | | | | | | | | | RECOGNITION, 3 COMPLEX |
| | | | | | | | | | | (TRANSCRIPTION |
| | | | | | | | | | | REGULATION/DNA) |
| 311 | 1ubd | C | 700 | 811 | 3e−57 | −0.12 | 0.90 | | YY1; CHAIN: C; ADENO- | COMPLEX (TRANSCRIPTION |
| | | | | | | | | | ASSOCIATED VIRUS P5 | REGULATION/DNA) YING-YANG 1; |
| | | | | | | | | | INITIATOR ELEMENT DNA; | TRANSCRIPTION INITIATION, |
| | | | | | | | | | CHAIN: A, B; | INITIATOR ELEMENT, YY1, ZINC 2 |
| | | | | | | | | | | FINGER PROTEIN, DNA-PROTEIN |
| | | | | | | | | | | RECOGNITION, 3 COMPLEX |
| | | | | | | | | | | (TRANSCRIPTION |
| | | | | | | | | | | REGULATION/DNA) |
| 311 | 1ubd | C | 728 | 839 | 1.5e−54 | 0.00 | 0.99 | | YY1; CHAIN: C; ADENO- | COMPLEX (TRANSCRIPTION |
| | | | | | | | | | ASSOCIATED VIRUS P5 | REGULATION/DNA) YING-YANG 1; |
| | | | | | | | | | INITIATOR ELEMENT DNA; | TRANSCRIPTION INITIATION, |
| | | | | | | | | | CHAIN: A, B; | INITIATOR ELEMENT, YY1, ZINC 2 |
| | | | | | | | | | | FINGER PROTEIN, DNA-PROTEIN |
| | | | | | | | | | | RECOGNITION, 3 COMPLEX |
| | | | | | | | | | | (TRANSCRIPTION |
| | | | | | | | | | | REGULATION/DNA) |
| 311 | 1ubd | C | 738 | 839 | 1.4e−34 | −0.08 | 0.98 | | YY1; CHAIN: C; ADENO- | COMPLEX (TRANSCRIPTION |
| | | | | | | | | | ASSOCIATED VIRUS P5 | REGULATION/DNA) YING-YANG 1; |
| | | | | | | | | | INITIATOR ELEMENT DNA; | TRANSCRIPTION INITIATION, |
| | | | | | | | | | CHAIN: A, B; | INITIATOR ELEMENT, YY1, ZINC 2 |
| | | | | | | | | | | FINGER PROTEIN, DNA-PROTEIN |
| | | | | | | | | | | RECOGNITION, 3 COMPLEX |
| | | | | | | | | | | (TRANSCRIPTION |
| | | | | | | | | | | REGULATION/DNA) |
| 311 | 1ubd | C | 756 | 852 | 1.2e−44 | −0.20 | 0.51 | | YY1; CHAIN: C; ADENO- | COMPLEX (TRANSCRIPTION |
| | | | | | | | | | ASSOCIATED VIRUS P5 | REGULATION/DNA) YING-YANG 1; |
| | | | | | | | | | INITIATOR ELEMENT DNA; | TRANSCRIPTION INITIATION, |
| | | | | | | | | | CHAIN: A, B; | INITIATOR ELEMENT, YY1, ZINC 2 |
| | | | | | | | | | | FINGER PROTEIN, DNA-PROTEIN |
| | | | | | | | | | | RECOGNITION, 3 COMPLEX |
| | | | | | | | | | | (TRANSCRIPTION |
| | | | | | | | | | | REGULATION/DNA) |
| 311 | 2gli | A | 119 | 250 | 1.4e−28 | −0.17 | 0.98 | | ZINC FINGER PROTEIN GLI1; | COMPLEX (DNA-BINDING |
| | | | | | | | | | CHAIN: A; DNA; CHAIN: C, D; | PROTEIN/DNA) FIVE-FINGER GLI; |
| | | | | | | | | | | GLI, ZINC FINGER, COMPLEX (DNA- |
| | | | | | | | | | | BINDING PROTEIN/DNA) |
| 311 | 2gli | A | 143 | 281 | 6e−55 | 0.02 | 0.53 | | ZINC FINGER PROTEIN GLI1; | COMPLEX (DNA-BINDING |
| | | | | | | | | | CHAIN: A; DNA; CHAIN: C, D; | PROTEIN/DNA) FIVE-FINGER GLI; |
| | | | | | | | | | | GLI, ZINC FINGER, COMPLEX (DNA- |
| | | | | | | | | | | BINDING PROTEIN/DNA) |
| 311 | 2gli | A | 198 | 334 | 8.5e−32 | −0.17 | 0.98 | | ZINC FINGER PROTEIN GLI1; | COMPLEX (DNA-BINDING |
| | | | | | | | | | CHAIN: A; DNA; CHAIN: C, D; | PROTEIN/DNA) FIVE-FINGER GLI; |
| | | | | | | | | | | GLI, ZINC FINGER, COMPLEX (DNA- |
| | | | | | | | | | | BINDING PROTEIN/DNA) |
| 311 | 2gli | A | 201 | 337 | 1.5e−65 | 0.34 | 0.86 | | ZINC FINGER PROTEIN GLI1; | COMPLEX (DNA-BINDING |
| | | | | | | | | | CHAIN: A; DNA; CHAIN: C, D; | PROTEIN/DNA) FIVE-FINGER GLI; |
| | | | | | | | | | | GLI, ZINC FINGER, COMPLEX (DNA- |
| | | | | | | | | | | BINDING PROTEIN/DNA) |
| 311 | 2gli | A | 226 | 365 | 4.5e−66 | 0.06 | 0.95 | | ZINC FINGER PROTEIN GLI1; | COMPLEX (DNA-BINDING |
| | | | | | | | | | CHAIN: A; DNA; CHAIN: C, D; | PROTEIN/DNA) FIVE-FINGER GLI; |
| | | | | | | | | | | GLI, ZINC FINGER, COMPLEX (DNA- |
| | | | | | | | | | | BINDING PROTEIN/DNA) |
| 311 | 2gli | A | 310 | 477 | 4.5e−64 | 0.04 | 0.60 | | ZINC FINGER PROTEIN GLI1; | COMPLEX (DNA-BINDING |
| | | | | | | | | | CHAIN: A; DNA; CHAIN: C, D; | PROTEIN/DNA) FIVE-FINGER GLI; |
| | | | | | | | | | | GLI, ZINC FINGER, COMPLEX (DNA- |
| | | | | | | | | | | BINDING PROTEIN/DNA) |
| 311 | 2gli | A | 346 | 474 | 5.1e−32 | 0.08 | 0.84 | | ZINC FINGER PROTEIN GLI1; | COMPLEX (DNA-BINDING |
| | | | | | | | | | CHAIN: A; DNA; CHAIN: C, D; | PROTEIN/DNA) FIVE-FINGER GLI; |
| | | | | | | | | | | GLI, ZINC FINGER, COMPLEX (DNA- |
| | | | | | | | | | | BINDING PROTEIN/DNA) |
| 311 | 2gli | A | 394 | 533 | 7.5e−72 | 0.06 | 1.00 | | ZINC FINGER PROTEIN GLI1; | COMPLEX (DNA-BINDING |
| | | | | | | | | | CHAIN: A; DNA; CHAIN: C, D; | PROTEIN/DNA) FIVE-FINGER GLI; |
| | | | | | | | | | | GLI, ZINC FINGER, COMPLEX (DNA- |
| | | | | | | | | | | BINDING PROTEIN/DNA) |
| 311 | 2gli | A | 422 | 561 | 7.5e−72 | | | 102.20 | ZINC FINGER PROTEIN GLI1; | COMPLEX (DNA-BINDING |
| | | | | | | | | | CHAIN: A; DNA; CHAIN: C, D; | PROTEIN/DNA) FIVE-FINGER GLI; |
| | | | | | | | | | | GLI, ZINC FINGER, COMPLEX (DNA- |
| | | | | | | | | | | BINDING PROTEIN/DNA) |
| 311 | 2gli | A | 430 | 558 | 3.4e−33 | 0.32 | 0.78 | | ZINC FINGER PROTEIN GLI1; | COMPLEX (DNA-BINDING |
| | | | | | | | | | CHAIN: A; DNA; CHAIN: C, D; | PROTEIN/DNA) FIVE-FINGER GLI; |
| | | | | | | | | | | GLI, ZINC FINGER, COMPLEX (DNA- |
| | | | | | | | | | | BINDING PROTEIN/DNA) |
| 311 | 2gli | A | 478 | 617 | 1.2e−68 | −0.09 | 0.65 | | ZINC FINGER PROTEIN GLI1; | COMPLEX (DNA-BINDING |
| | | | | | | | | | CHAIN: A; DNA; CHAIN: C, D; | PROTEIN/DNA) FIVE-FINGER GLI; |
| | | | | | | | | | | GLI, ZINC FINGER, COMPLEX (DNA- |
| | | | | | | | | | | BINDING PROTEIN/DNA) |
| 311 | 2gli | A | 570 | 698 | 1.2e−33 | −0.19 | 0.07 | | ZINC FINGER PROTEIN GLI1; | COMPLEX (DNA-BINDING |
| | | | | | | | | | CHAIN: A; DNA; CHAIN: C, D; | PROTEIN/DNA) FIVE-FINGER GLI; |
| | | | | | | | | | | GLI, ZINC FINGER, COMPLEX (DNA- |
| | | | | | | | | | | BINDING PROTEIN/DNA) |
| 311 | 2gli | A | 654 | 782 | 1.2e−33 | 0.17 | 0.55 | | ZINC FINGER PROTEIN GLI1; | COMPLEX (DNA-BINDING |
| | | | | | | | | | CHAIN: A; DNA; CHAIN: C, D; | PROTEIN/DNA) FIVE-FINGER GLI; |
| | | | | | | | | | | GLI, ZINC FINGER, COMPLEX (DNA- |
| | | | | | | | | | | BINDING PROTEIN/DNA) |
| 311 | 2gli | A | 674 | 841 | 4.5e−70 | −0.08 | 0.63 | | ZINC FINGER PROTEIN GLI1; | COMPLEX (DNA-BINDING |
| | | | | | | | | | CHAIN: A; DNA; CHAIN: C, D; | PROTEIN/DNA) FIVE-FINGER GLI; |
| | | | | | | | | | | GLI, ZINC FINGER, COMPLEX (DNA- |
| | | | | | | | | | | BINDING PROTEIN/DNA) |
| 311 | 2gli | A | 682 | 810 | 5.1e−33 | 0.03 | 0.62 | | ZINC FINGER PROTEIN GLI1; | COMPLEX (DNA-BINDING |
| | | | | | | | | | CHAIN: A; DNA; CHAIN: C, D; | PROTEIN/DNA) FIVE-FINGER GLI; |
| | | | | | | | | | | GLI, ZINC FINGER, COMPLEX (DNA- |
| | | | | | | | | | | BINDING PROTEIN/DNA) |
| 311 | 2gli | A | 710 | 841 | 6.8e−34 | −0.14 | 0.84 | | ZINC FINGER PROTEIN GLI1; | COMPLEX (DNA-BINDING |
| | | | | | | | | | CHAIN: A; DNA; CHAIN: C, D; | PROTEIN/DNA) FIVE-FINGER GLI; |
| | | | | | | | | | | GLI, ZINC FINGER, COMPLEX (DNA- |
| | | | | | | | | | | BINDING PROTEIN/DNA) |
| 311 | 2gli | A | 730 | 852 | 6e−60 | 0.12 | 0.80 | | ZINC FINGER PROTEIN GLI1; | COMPLEX (DNA-BINDING |
| | | | | | | | | | CHAIN: A; DNA; CHAIN: C, D; | PROTEIN/DNA) FIVE-FINGER GLI; |
| | | | | | | | | | | GLI, ZINC FINGER, COMPLEX (DNA- |
| | | | | | | | | | | BINDING PROTEIN/DNA) |
| 311 | 2gli | A | 738 | 851 | 3.4e−29 | 0.17 | 0.80 | | ZINC FINGER PROTEIN GLI1; | COMPLEX (DNA-BINDING |
| | | | | | | | | | CHAIN: A; DNA; CHAIN: C, D; | PROTEIN/DNA) FIVE-FINGER GLI; |
| | | | | | | | | | | GLI, ZINC FINGER, COMPLEX (DNA- |
| | | | | | | | | | | BINDING PROTEIN/DNA) |
| 312 | 1b34 | A | 7 | 81 | 4.5e−23 | 0.29 | 0.30 | | SMALL NUCLEAR | RNA BINDING PROTEIN SNRNP, |
| | | | | | | | | | RIBONUCLEOPROTEIN SM D1; | SPLICING, SPLICEOSOME, SM, CORE |
| | | | | | | | | | CHAIN: A; SMALL NUCLEAR | SNRNP DOMAIN, 2 SYSTEMIC LUPUS |
| | | | | | | | | | RIBONUCLEOPROTEIN SM D2; | ERYTHEMATOSUS, SLE |
| | | | | | | | | | CHAIN: B; | |
| 312 | 1b34 | A | 9 | 71 | 3.4e−17 | 0.08 | 0.04 | | SMALL NUCLEAR | RNA BINDING PROTEIN SNRNP, |
| | | | | | | | | | RIBONUCLEOPROTEIN SM D1; | SPLICING, SPLICEOSOME, SM, CORE |
| | | | | | | | | | CHAIN: A; SMALL NUCLEAR | SNRNP DOMAIN, 2 SYSTEMIC LUPUS |
| | | | | | | | | | RIBONUCLEOPROTEIN SM D2; | ERYTHEMATOSUS, SLE |
| | | | | | | | | | CHAIN: B; | |
| 312 | 1b34 | B | 7 | 72 | 1.2e−12 | 0.46 | 0.18 | | SMALL NUCLEAR | RNA BINDING PROTEIN SNRNP, |
| | | | | | | | | | RIBONUCLEOPROTEIN SM D1; | SPLICING, SPLICEOSOME, SM, CORE |
| | | | | | | | | | CHAIN: A; SMALL NUCLEAR | SNRNP DOMAIN, 2 SYSTEMIC LUPUS |
| | | | | | | | | | RIBONUCLEOPROTEIN SM D2; | ERYTHEMATOSUS, SLE |
| | | | | | | | | | CHAIN: B; | |
| 312 | 1d3b | A | 5 | 72 | 1.7e−14 | 0.28 | 0.07 | | SMALL NUCLEAR | RNA BINDING PROTEIN D3 CORE |
| | | | | | | | | | RIBONUCLEOPROTEIN SM D3; | SNRNP PROTEIN; B CORE SNRNP |
| | | | | | | | | | CHAIN: A, C, E, G, I, K; SMALL | PROTEIN SNRNP, SPLICING, SM, |
| | | | | | | | | | NUCLEAR RIBONUCLEOPROTEIN | CORE SNRNP DOMAIN, SYSTEMIC |
| | | | | | | | | | ASSOCIATED CHAIN: B, D, F, H, J, | LUPUS 2 ERYTHEMATOSUS, SLE, |
| | | | | | | | | | L; | RNA BINDING PROTEIN |
| 312 | 1d3b | A | 7 | 76 | 1.1e−20 | 0.63 | 0.05 | | SMALL NUCLEAR | RNA BINDING PROTEIN D3 CORE |
| | | | | | | | | | RIBONUCLEOPROTEIN SM D3; | SNRNP PROTEIN; B CORE SNRNP |
| | | | | | | | | | CHAIN: A, C, E, G, I, K; SMALL | PROTEIN SNRNP, SPLICING, SM, |
| | | | | | | | | | NUCLEAR RIBONUCLEOPROTEIN | CORE SNRNP DOMAIN, SYSTEMIC |
| | | | | | | | | | ASSOCIATED CHAIN: B, D, F, H, J, | LUPUS 2 ERYTHEMATOSUS, SLE, |
| | | | | | | | | | L; | RNA BINDING PROTEIN |
| 312 | 1d3b | B | 10 | 78 | 7.5e−18 | 0.34 | −0.06 | | SMALL NUCLEAR | RNA BINDING PROTEIN D3 CORE |
| | | | | | | | | | RIBONUCLEOPROTEIN SM D3; | SNRNP PROTEIN; B CORE SNRNP |
| | | | | | | | | | CHAIN: A, C, E, G, I, K; SMALL | PROTEIN SNRNP, SPLICING, SM, |
| | | | | | | | | | NUCLEAR RIBONUCLEOPROTEIN | CORE SNRNP DOMAIN, SYSTEMIC |
| | | | | | | | | | ASSOCIATED CHAIN: B, D, F, H, J, | LUPUS 2 ERYTHEMATOSUS, SLE, |
| | | | | | | | | | L; | RNA BINDING PROTEIN |
| 312 | 1d3b | B | 9 | 70 | 1.7e−15 | −0.01 | 0.04 | | SMALL NUCLEAR | RNA BINDING PROTEIN D3 CORE |
| | | | | | | | | | RIBONUCLEOPROTEIN SM D3; | SNRNP PROTEIN; B CORE SNRNP |
| | | | | | | | | | CHAIN: A, C, E, G, I, K; SMALL | PROTEIN SNRNP, SPLICING, SM, |
| | | | | | | | | | NUCLEAR RIBONUCLEOPROTEIN | CORE SNRNP DOMAIN, SYSTEMIC |
| | | | | | | | | | ASSOCIATED CHAIN: B, D, F, H, J, | LUPUS 2 ERYTHEMATOSUS, SLE, |
| | | | | | | | | | L; | RNA BINDING PROTEIN |
| 312 | 1d3b | D | 4 | 70 | 6.8e−16 | 0.76 | −0.05 | | SMALL NUCLEAR | RNA BINDING PROTEIN D3 CORE |
| | | | | | | | | | RIBONUCLEOPROTEIN SM D3; | SNRNP PROTEIN; B CORE SNRNP |
| | | | | | | | | | CHAIN: A, C, E, G, I, K; SMALL | PROTEIN SNRNP, SPLICING, SM, |
| | | | | | | | | | NUCLEAR RIBONUCLEOPROTEIN | CORE SNRNP DOMAIN, SYSTEMIC |
| | | | | | | | | | ASSOCIATED CHAIN: B, D, F, H, J, | LUPUS 2 ERYTHEMATOSUS, SLE, |
| | | | | | | | | | L; | RNA BINDING PROTEIN |
| 312 | 1d3b | D | 9 | 78 | 1.5e−17 | 0.11 | −0.01 | | SMALL NUCLEAR | RNA BINDING PROTEIN D3 CORE |
| | | | | | | | | | RIBONUCLEOPROTEIN SM D3; | SNRNP PROTEIN; B CORE SNRNP |
| | | | | | | | | | CHAIN: A, C, E, G, I, K; SMALL | PROTEIN SNRNP, SPLICING, SM, |
| | | | | | | | | | NUCLEAR RIBONUCLEOPROTEIN | CORE SNRNP DOMAIN, SYSTEMIC |
| | | | | | | | | | ASSOCIATED CHAIN: B, D, F, H, J, | LUPUS 2 ERYTHEMATOSUS, SLE, |
| | | | | | | | | | L; | RNA BINDING PROTEIN |
| 314 | 1b8q | A | 101 | 173 | 1.3e−06 | 0.08 | 0.15 | | NEURONAL NITRIC OXIDE | OXIDOREDUCTASE PDZ DOMAIN, |
| | | | | | | | | | SYNTHASE; CHAIN: A; | NNOS, NITRIC OXIDE SYNTHASE |
| | | | | | | | | | HEPTAPEPTIDE; CHAIN: B; | |
| 314 | 1be9 | A | 113 | 175 | 8.5e−05 | 0.19 | 0.99 | | PSD-95; CHAIN: A; CRIPT; CHAIN: | PEPTIDE RECOGNITION PEPTIDE |
| | | | | | | | | | B; | RECOGNITION, PROTEIN |
| | | | | | | | | | | LOCALIZATION |
| 314 | 1pdr | | 113 | 175 | 0.0012 | 0.13 | 0.90 | | HUMAN DISCS LARGE PROTEIN; | SIGNAL TRANSDUCTION HDLG, |
| | | | | | | | | | CHAIN: NULL; | DHR3 DOMAIN; SIGNAL |
| | | | | | | | | | | TRANSDUCTION, SH3 DOMAIN, |
| | | | | | | | | | | REPEAT |
| 314 | 1qlc | A | 119 | 172 | 0.00034 | 0.27 | 0.99 | | POSTSYNAPTIC DENSITY | PEPTIDE RECOGNITION PSD-95; PDZ |
| | | | | | | | | | PROTEIN 95; CHAIN: A; | DOMAIN, NEURONAL NITRIC OXIDE |
| | | | | | | | | | | SYNTHASE, NMDA RECEPTOR 2 |
| | | | | | | | | | | BINDING |
| 314 | 3pdz | A | 109 | 190 | 3e−09 | 0.73 | 0.76 | | TYROSINE PHOSPHATASE (PTP- | HYDROLASE PDZ DOMAIN, HUMAN |
| | | | | | | | | | BAS, TYPE 1); CHAIN: A; | PHOSPHATASE, HPTPIE, PTP-BAS, |
| | | | | | | | | | | SPECIFICITY 2 OF BINDING |
| 316 | 1a4y | A | 805 | 893 | 4.5e−05 | 0.52 | 0.60 | | RIBONUCLEASE INHIBITOR; | COMPLEX (INHIBITOR/NUCLEASE) |
| | | | | | | | | | CHAIN: A, D; ANGIOGENIN; | COMPLEX (INHIBITOR/NUCLEASE), |
| | | | | | | | | | CHAIN: B, E; | COMPLEX (RI-ANG), HYDROLASE 2 |
| | | | | | | | | | | MOLECULAR RECOGNITION, |
| | | | | | | | | | | EPITOPE MAPPING LEUCINE-RICH 3 |
| | | | | | | | | | | REPEATS |
| 316 | 1a4y | A | 815 | 877 | 7.5e−08 | 0.54 | 1.00 | | RIBONUCLEASE INHIBITOR; | COMPLEX (INHIBITOR/NUCLEASE) |
| | | | | | | | | | CHAIN: A, D; ANGIOGENIN; | COMPLEX (INHIBITOR/NUCLEASE), |
| | | | | | | | | | CHAIN: B, E; | COMPLEX (RI-ANG), HYDROLASE 2 |
| | | | | | | | | | | MOLECULAR RECOGNITION, |
| | | | | | | | | | | EPITOPE MAPPING, LEUCINE-RICH 3 |
| | | | | | | | | | | REPEATS |
| 316 | 1aoj | A | 590 | 647 | 6e−16 | −0.80 | 0.30 | | EPS8; CHAIN: A, B; | SIGNAL TRANSDUCTION SRC |
| | | | | | | | | | | HOMOLOGY DOMAIN; SIGNAL |
| | | | | | | | | | | TRANSDUCTION, SH3 DOMAIN, EPS8, |
| | | | | | | | | | | PROLINE RICH PEPTIDE |
| 316 | 1tud | | 577 | 627 | 1.1e−07 | −0.30 | 0.64 | | ALPHA-SPECTRIN; CHAIN: NULL; | CYTOSKELETON CAPPING PROTEIN, |
| | | | | | | | | | | CALCIUM-BINDING, DUPLICATION, |
| | | | | | | | | | | REPEAT, 2 SH3 DOMAIN, |
| 316 | 2nmb | A | 155 | 263 | 9e−14 | −0.13 | 0.10 | | NUMB PROTEIN; CHAIN: A; GPPY | CELL CYCLE/GENE REGULATION |
| | | | | | | | | | PEPTIDE; CHAIN: B; | COMPLEX, SIGNAL TRANSDUCTION, |
| | | | | | | | | | | PHOSPHOTYROSINE BINDING 2 |
| | | | | | | | | | | DOMAIN (PTB), ASYMETR IC CELL |
| | | | | | | | | | | DIVISION, CELL CYCLE/GENE 3 |
| | | | | | | | | | | REGULATION |
| 318 | 1a5f | H | 38 | 246 | 1.4e−20 | | | 69.16 | MONOCLONAL ANTI-E-SELECTIN | IMMUNOGLOBULIN |
| | | | | | | | | | 7A9 ANTIBODY; CHAIN: L, H; | IMMUNOGLOBULIN, FAB, |
| | | | | | | | | | | ANTIBODY, ANTI-E-SELECTIN |
| 318 | 1adq | L | 41 | 241 | 6.8e−29 | 0.18 | 0.35 | | IGG4 REA; CHAIN: A; RF-AN | COMPLEX |
| | | | | | | | | | IGM/LAMBDA; CHAIN: H, L; | (IMMUNOGLOBULIN/AUTOANTIGEN) |
| | | | | | | | | | | COMPLEX |
| | | | | | | | | | | (IMMUNOGLOBULIN/AUTOANTIGEN), |
| | | | | | | | | | | RHEUMATOID FACTOR 2 AUTO- |
| | | | | | | | | | | ANTIBODY COMPLEX |
| 318 | 1ac6 | H | 38 | 255 | 1.7e−22 | | | 64.20 | ANTIBODY CTM01; CHAIN: L, H; | IMMUNOGLOBULIN |
| | | | | | | | | | | IMMUNOGLOBULIN, FAB |
| | | | | | | | | | | FRAGMENT, HUMANISATION |
| 318 | 1afv | H | 38 | 236 | 1.7e−23 | 0.11 | 1.00 | | HUMAN IMMUNODEFICIENCY | COMPLEX (VIRAL |
| | | | | | | | | | VIRUS TYPE 1 CAPSID CHAIN: A, | CAPSID/IMMUNOGLOBULIN) HIV-I |
| | | | | | | | | | B; ANTIBODY FAB25.3 | CA, HIV CA, HIV P24, P24; FAB, FAB |
| | | | | | | | | | FRAGMENT; CHAIN: H, K, L, M; | LIGHT CHAIN, FAB HEAVY CHAIN |
| | | | | | | | | | | COMPLEX (VIRAL |
| | | | | | | | | | | CAPSID/IMMUNOGLOBULIN), HIV, |
| | | | | | | | | | | CAPSID PROTEIN, 2 P24 |
| 318 | 1aqk | H | 39 | 247 | 3.4e−20 | | | 65.54 | FAB B7-15A2; CHAIN: L, H; | IMMUNOGLOBULIN HUMAN FAB, |
| | | | | | | | | | | ANTI-TETANUS TOXOID, HIGH |
| | | | | | | | | | | AFFINITY, CRYSTAL 2 PACKING |
| | | | | | | | | | | MOTIF, PROGRAMMING |
| | | | | | | | | | | PROPENSITY TO CRYSTALLIZE, 3 |
| | | | | | | | | | | IMMUNOGLOBULIN |
| 318 | 1aqk | L | 40 | 260 | 1.7e−26 | | | 64.54 | FAB B7-15A2; CHAIN: L, H; | IMMUNOGLOBULIN HUMAN FAB, |
| | | | | | | | | | | ANTI-TETANUS TOXOID, HIGH |
| | | | | | | | | | | AFFINITY, CRYSTAL 2 PACKING |
| | | | | | | | | | | MOTIF, PROGRAMMING |
| | | | | | | | | | | PROPENSITY TO CRYSTALLIZE, 3 |
| | | | | | | | | | | IMMUNOGLOBULIN |
| 318 | 1aqk | L | 41 | 241 | 1.7e−26 | 0.21 | 0.74 | | FAR B7-15A2; CHAIN: L, H; | IMMUNOGLOBULIN HUMAN FAB, |
| | | | | | | | | | | ANTI-TETANUS TOXOID, HIGH |
| | | | | | | | | | | AFFINITY, CRYSTAL 2 PACKING |
| | | | | | | | | | | MOTIF, PROGRAMMING |
| | | | | | | | | | | PROPENSITY TO CRYSTALLIZE, 3 |
| | | | | | | | | | | IMMUNOGLOBULIN |
| 318 | 1ay1 | H | 50 | 236 | 8.5e−23 | −0.10 | 0.28 | | TP7 FAB; CHAIN: L, H; | IMMUNOGLOBULIN |
| | | | | | | | | | | IMMUNOGLOBULIN, ANTBODY, |
| | | | | | | | | | | FAB, ENZYME INHIBITOR, PCR, 2 |
| | | | | | | | | | | HOT START |
| 318 | 1b2w | H | 39 | 247 | 1.2e−19 | | | 63.67 | ANTIBODY (LIGHT CHAIN); | IMMUNE SYSTEM |
| | | | | | | | | | CHAIN: L; ANTIBODY (HEAVY | IMMUNOGLOBULIN; |
| | | | | | | | | | CHAIN); CHAIN: H; | IMMUNOGLOBULIN ANTIBODY |
| | | | | | | | | | | ENGINEERING, HUMANIZED AND |
| | | | | | | | | | | CHIMERIC ANTIBODY, FAB, 2 X-RAY |
| | | | | | | | | | | STRUCTURE, THREE-DIMENSIONAL, |
| | | | | | | | | | | STRYCTURE, GAMMA-3 |
| | | | | | | | | | | INTERFERON, IMMUNE SYSTEM |
| 318 | 1b2w | L | 38 | 259 | 1.5e−23 | | | 64.13 | ANTIBODY (LIGHT CHAIN): | IMMUNE SYSTEM |
| | | | | | | | | | CHAIN: L; ANTIBODY (HEAVY | IMMUNOGLOBULIN; |
| | | | | | | | | | CHAIN): CHAIN: H; | IMMUNOGLOBULIN ANTIBODY |
| | | | | | | | | | | ENGINEERING, HUMANIZED AND |
| | | | | | | | | | | CHIMERIC ANTIBODY, FAB, 2 X-RAY |
| | | | | | | | | | | STRUCTURE, THREE-DIMENSIONAL |
| | | | | | | | | | | STRYCTURE, GAMMA-3 |
| | | | | | | | | | | INTERFERON, IMMUNE SYSTEM |
| 318 | 1b2w | L | 39 | 232 | 1.5e−23 | −0.00 | 0.07 | | ANTIBODY (LIGHT CHAIN); | IMMUNE SYSTEM |
| | | | | | | | | | CHAIN: L; ANTIBODY (HEAVY | IMMUNOGLOBULIN; |
| | | | | | | | | | CHAIN); CHAIN: H; | IMMUNOGLOBULIN ANTIBODY |
| | | | | | | | | | | ENGINEERING, HUMANIZED AND |
| | | | | | | | | | | CHIMERIC ANTIBODY, FAB, 2 X-RAY |
| | | | | | | | | | | STRUCTURE, THREE-DIMENSIONAL |
| | | | | | | | | | | STRYCTURE, GAMMA-3 |
| | | | | | | | | | | INTERFERON, IMMUNE SYSTEM |
| 318 | 1b4j | H | 39 | 247 | 1.2e−19 | | | 67.97 | ANTIBODY; CHAIN: L, H; | ANTIBODY ENGINEERING |
| | | | | | | | | | | ANTIBODY ENGINEERING, |
| | | | | | | | | | | HUMANIZED AND CHIMERIC |
| | | | | | | | | | | ANTIBODIES, 2 FAB, X-RAY |
| | | | | | | | | | | STRUCTURES, GAMMA-INTERFERON |
| 318 | 1baf | H | 37 | 259 | 8.5e−21 | | | 65.16 | IMMUNOGLOBULIN FAB | |
| | | | | | | | | | FRAGMENT OF MURINE | |
| | | | | | | | | | MONOCLONAL ANTIBODY AN02 | |
| | | | | | | | | | COMPLEX 1BAF 3 WITH ITS | |
| | | | | | | | | | HAPTEN (2,2,6,6-TETRAMETHYL- | |
| | | | | | | | | | 1-PIPERIDINYLOXY-1BAF 4 | |
| | | | | | | | | | DINITROPHENYL) 1BAF 5 | |
| 318 | 1bih | A | 90 | 246 | 8.5e−20 | 0.30 | 0.41 | | HEMOLIN; CHAIN: A, B; | INSECT IMMUNITY INSECT |
| | | | | | | | | | | IMMUNITY, LPS-BINDING, |
| | | | | | | | | | | HOMOPHILIC ADHESION |
| 318 | 1bjl | L | 39 | 232 | 1e−22 | 0.22 | 0.11 | | FAB FRAGMENT; CHAIN: L, H, J, | COMPLEX (ANTIBODY/ANTIGEN) |
| | | | | | | | | | K; VASCULAR ENDOTHELIAL | FAB-12; VEGF; COMPLEX |
| | | | | | | | | | GROWTH FACTOR; CHAIN: V, W; | (ANTIBODY/ANTIGEN), ANGIOGENIC |
| | | | | | | | | | | FACTOR |
| 318 | 1bjm | A | 40 | 241 | 1.7e−26 | 0.07 | 0.11 | | LOC-LAMBDA I TYPE LIGHT- | IMMUNOGLOBULIN BENCE-JONES |
| | | | | | | | | | CHAIN DIMER; 1BJM 6 CHAIN: A, | PROTEIN; 1BJM 8 BENCE JONES, |
| | | | | | | | | | B; 1BJM 7 | ANTIBODY, MULTIPLE |
| | | | | | | | | | | QUATERNARY STRUCTURES 1BJM 13 |
| 318 | 1bm3 | H | 37 | 259 | 6.8e−21 | | | 68.28 | IMMUNOGLOBULIN OPG2 FAB, | IMMUNE SYSTEM |
| | | | | | | | | | CONSTANT DOMAIN; CHAIN: L; | IMMUNOGLOBULIN |
| | | | | | | | | | IMMUNOGLOBULIN OPG2 FAB, | |
| | | | | | | | | | VARIABLE DOMAIN; CHAIN: H; | |
| 318 | 1ct8 | H | 37 | 254 | 5.1e−22 | | | 64.09 | CATALYTIC ANTIBODY 19A4 | CATALYTIC ANTIBODY CATALYTIC |
| | | | | | | | | | (LIGHT CHAIN); CHAIN: L; | ANTIBODY, TERPENOID SYNTHASE, |
| | | | | | | | | | CATALYTIC ANTIBODY 19A4 | CARBOCATION, 2 CYCLIZATION |
| | | | | | | | | | (HEAVY CHAIN); CHAIN: H; | CASCADE |
| 318 | 1cic | B | 38 | 257 | 5.1e−22 | | | 67.07 | IG HEAVY CHAIN V REGIONS; | IMMUNOGLOBULIN |
| | | | | | | | | | CHAIN: A; IG HEAVY CHAIN V | IMMUNOGLOBULIN, FAB COMPLEX, |
| | | | | | | | | | REGIONS; CHAIN: B; IG HEAVY | IDIOTOPE, ANTI-IDIOTOPE |
| | | | | | | | | | CHAIN V REGIONS; CHAIN: C; IG | |
| | | | | | | | | | HEAVY CHAIN V REGIONS; | |
| | | | | | | | | | CHAIN D; | |
| 318 | 1cs6 | A | 45 | 247 | 1.7e−32 | 0.03 | 0.77 | | AXONIN-I; CHAIN: A; | CELL ADHESION NEURAL CELL |
| | | | | | | | | | | ADHESION |
| 318 | 1ct8 | B | 38 | 259 | 3.4e−22 | | | 64.34 | 7C8 FAB FRAGMENT; SHORT | IMMUNE SYSTEM ABZYME |
| | | | | | | | | | CHAIN; CHAIN: A, C; 7C8 FAB | TRANSITION STATE ANALOG, |
| | | | | | | | | | FRAGMENT; LONG CHAIN; | IMMUNE SYSTEM |
| | | | | | | | | | CHAIN: B, D | |
| 318 | 1cvs | C | 174 | 249 | 1.7e−12 | 0.27 | 0.34 | | FIBROBLAST GROWTH FACTOR | GROWTH FACTOR/GROWTH FACTOR |
| | | | | | | | | | 2; CHAIN: A, B; FIBROBLAST | RECEPTOR FGF, FGFR, |
| | | | | | | | | | GROWTH FACTOR RECEPTOR 1; | IMMUNOGLOBULIN-LIKE, SIGNAL |
| | | | | | | | | | CHAIN: C, D; | TRANSDUCTION, 2 DIMERIZATION, |
| | | | | | | | | | | GROWTH FACTOR/GROWTH FACTOR |
| | | | | | | | | | | RECEPTOR |
| 318 | 1cvs | D | 174 | 249 | 1.7e−12 | 0.22 | 0.34 | | FIBROBLAST GROWTH FACTOR | GROWTH FACTOR/GROWTH FACTOR |
| | | | | | | | | | 2; CHAIN: A, B; FIBROBLAST | RECEPTOR FGF, FGFR, |
| | | | | | | | | | GROWTH FACTOR RECEPTOR 1; | IMMUNOGLOBULIN-LIKE, SIGNAL |
| | | | | | | | | | CHAIN: C, D; | TRANSDUCTION, 2 DIMERIZATION, |
| | | | | | | | | | | GROWTH FACTOR/GROWTH FACTOR |
| | | | | | | | | | | RECEPTOR |
| 318 | 1dee | A | 39 | 232 | 3.4e−23 | 0.15 | 0.06 | | IGM RF 2A2; CHAIN: A, C, E; IGM | IMMUNE SYSTEM FAB-IBP COMPLEX |
| | | | | | | | | | RF 2A2; CHAIN: B, D, F; | CRYSTAL STRUCTURE 2.7A |
| | | | | | | | | | IMMUNOGLOBULIN G BINDING | RESOLUTION BINDING 2 OUTSIDE |
| | | | | | | | | | PROTEIN A; CHAIN: G, H; | THE ANTIGEN COMBINING SITE |
| | | | | | | | | | | SUPERANTIGEN FAB VH3 3 |
| | | | | | | | | | | SPECIFICITY |
| 318 | 1ev2 | E | 173 | 249 | 1.7e−13 | 0.13 | 0.25 | | FIBROBLAST GROWTH FACTOR | GROWTH FACTOR/GROWTH FACTOR |
| | | | | | | | | | 2; CHAIN: A, B, C, D; FIBROBLAST | RECEPTOR FGF2; FGFR2; |
| | | | | | | | | | GROWTH FACTOR RECEPTOR 2; | IMMUNOGLOBULIN (IG)LIKE |
| | | | | | | | | | CHAIN: E, F, G, H; | DOMAINS BELONGING TO THE I-SET |
| | | | | | | | | | | 2 SUBGROUP WITHIN IG-LIKE |
| | | | | | | | | | | DOMAINS, B-TREFOIL FOLD |
| 318 | 1evl | C | 174 | 249 | 1.7e−12 | 0.37 | 0.13 | | FIBROBLAST GROWTH FACTOR | GROWTH FACTOR/GROWTH FACTOR |
| | | | | | | | | | 1; CHAIN: A, B; FIBROBLAST | RECEPTOR FGFI; EGERI; |
| | | | | | | | | | GROWTH FACTOR RECEPTOR 1; | IMMUNOGLOBULIN (IG) LIKE |
| | | | | | | | | | CHAIN: C, D; | DOMAINS BELONGING TO THE I-SET |
| | | | | | | | | | | 2 SUBGROUP WITHIN IG-LIKE |
| | | | | | | | | | | DOMAINS, B-TREFOIL FOLD |
| 318 | 1fai | H | 38 | 254 | 3.4e−19 | | | 63.84 | IMMUNOGLOBULIN FAB | |
| | | | | | | | | | FRAGMENT FROM A | |
| | | | | | | | | | MONOCLONAL ANTI-ARSONATE | |
| | | | | | | | | | ANTIBODY, R19.9 1FAI 3 | |
| | | | | | | | | | (IGG2B,KAPPA) 1FAI 4 | |
| 318 | 1thg | A | 154 | 247 | 1.5e−08 | 0.27 | 0.16 | | TELOKIN; CHAIN: A | CONTRACTILE PROTEIN |
| | | | | | | | | | | IMMUNOGLOBULIN FOLD, BETA |
| | | | | | | | | | | BARREL |
| 318 | 1fvd | B | 37 | 247 | 5.1e−21 | | | 66.24 | IMMUNOGLOBULIN FAB | |
| | | | | | | | | | FRAGMENT OF HUMANIZED | |
| | | | | | | | | | ANTIBODY 4D5, VERSION 4 IFVD 3 | |
| 318 | 1hnf | | 43 | 232 | 1.3e−23 | 0.02 | 0.10 | | TLYMPHOCYTE ADHESION | |
| | | | | | | | | | GLYCOPROTEIN CD2 (HUMAN) | |
| | | | | | | | | | IHNF 3 | |
| 318 | 1iai | H | 38 | 254 | 5.1e−20 | | | 65.01 | IDIOTYPIC FAB 730.1.4 (IGG1) OF | COMPLEX (IMMUNOGLOBULIN |
| | | | | | | | | | VIRUS IIAI 5 CHAIN: L, H; 1IAI 7 | IGG1/IGG2A) |
| | | | | | | | | | ANTI-IDIOTYPIC FAB 409.5.3 | |
| | | | | | | | | | (IGG2A); IIAI 9 CHAIN: M, I 1IAI | |
| | | | | | | | | | 10 | |
| 318 | 1lil | A | 40 | 241 | 1.7e−25 | 0.18 | 0.13 | | LAMBDA III BENCE JONES | IMMUNOGLOBULIN |
| | | | | | | | | | PROTEIN CLE; CHAIN: A, B | IMMUNOGLOBULIN, BENCE JONES |
| | | | | | | | | | | PROTEIN |
| 318 | 1nca | H | 38 | 254 | 1.5e−21 | | | 67.34 | HYDROLASE(O-GLYCOSYL) N9 | |
| | | | | | | | | | NEURAMINIDASE-NC41 | |
| | | | | | | | | | (E.C.3.2.1.18) COMPLEX WITH FAB | |
| | | | | | | | | | 1NCA 3 | |
| 318 | 1nsn | H | 37 | 254 | 1.4e−22 | | | 65.27 | IGG FAB (IGG1, KAPPA): 1NSN 4 | COMPLEX |
| | | | | | | | | | CHAIN: L, H; 1NSN 5 | (IMMUNOGLOBULIN/HYDROLASE) |
| | | | | | | | | | STAPHYLOCOCCAL NUCLEASE: | N10 FAB IMMUNOGLOBULIN: 1NSN 7 |
| | | | | | | | | | 1NSN 9 CHAIN: S; 1NSN 10 | STAPHYLOCOCCAL NUCLEASE |
| | | | | | | | | | | RIBONUCLEATE, 1NSN 11 |
| | | | | | | | | | | IMMUNOGLOBULIN. |
| | | | | | | | | | | STAPHYLOCOCCAL NUCLEASE 1NSN |
| | | | | | | | | | | 25 |
| 318 | 1wio | A | 47 | 262 | 7.5e−28 | 0.19 | 0.29 | | T-CELL SURFACE | GLYCOPROTEIN CD4; |
| | | | | | | | | | GLYCOPROTEIN CD4; CHAIN: A, | IMMUNOGLOBULIN FOLD. |
| | | | | | | | | | B; | TRANSMEMBRANE, GLYCOPROTEIN, |
| | | | | | | | | | | T-CELL, 2 MHC LIPOPROTEIN, |
| | | | | | | | | | | POLYMORPHISM |
| 318 | 25c8 | H | 38 | 255 | 5.1e−23 | | | 64.25 | IGG 5C8; CHAIN: L, H; | CATALYTIC ANTIBODY CATALYTIC |
| | | | | | | | | | | ANTIBODY, FAB, RING CLOSURE |
| | | | | | | | | | | REACTION |
| 318 | 25c8 | H | 50 | 236 | 5.1e−23 | 0.12 | 0.19 | | IGG 5C8; CHAIN: L, H; | CATALYTIC ANTIBODY CATALYTIC |
| | | | | | | | | | | ANTIBODY, FAB, RING CLOSURE |
| | | | | | | | | | | REACTION |
| 318 | 2cgr | H | 37 | 254 | 1.2e−17 | | | 65.11 | IMMUNOGLOBULIN IGG2B | |
| | | | | | | | | | (KAPPA) FAB FRAGMENT | |
| | | | | | | | | | COMPLEXED WITH ANTIGEN | |
| | | | | | | | | | 2CGR 3 N-(P-CYANOPHENYL)-N′- | |
| | | | | | | | | | (DIPHENYLEMETHYL) | |
| | | | | | | | | | GUANIDINEACETIC ACID 2CGR 4 | |
| 318 | 2tb4 | L | 40 | 241 | 1.5e−25 | 0.29 | 0.37 | | IMMUNOGLOBULIN | |
| | | | | | | | | | IMMUNOGLOBULIN FAB 2FB4 4 | |
| 318 | 2fgw | L | 39 | 232 | 1.2e−23 | 0.27 | 0.01 | | IMMUNOGLOBULIN FAB | |
| | | | | | | | | | FRAGMENT OF A HUMANIZED | |
| | | | | | | | | | VERSION OF THE ANTI-CD18 | |
| | | | | | | | | | 2FGW 3 ANTIBODY ‘H52’ (HUH52- | |
| | | | | | | | | | OZ FAB) 2FGW 4 | |
| 318 | 2mcg | I | 40 | 241 | 1.2e−27 | 0.14 | 0.30 | | IMMUNOGLOBULIN | |
| | | | | | | | | | IMMUNOGLOBULIN LAMBDA | |
| | | | | | | | | | LIGHT CHAIN DIMER (/MCG$) | |
| | | | | | | | | | 2MCG 3 (TRIGONAL FORM) 2MCG 4 | |
| 318 | 2pcp | B | 38 | 255 | 3.4e−21 | | | 68.25 | IMMUNOGLOBULIN; CHAIN: A, B, | IMMUNOGLOBULIN |
| | | | | | | | | | C, D; | IMMUNOGLOBULIN |
| 318 | 32c2 | B | 50 | 236 | 3.4e−23 | 0.21 | 0.13 | | IGG1 ANTIBODY 32C2; CHAIN: A; | IMMUNE SYSTEM FAB, ANTIBODY, |
| | | | | | | | | | IGG1 ANTIBODY 32C2; CHAIN: B; | AROMATASE, P450 |
| 318 | 3fct | B | 37 | 247 | 8.5e−19 | | | 66.99 | METAL CHELATASE CATALYTIC | IMMUNE SYSTEM METAL |
| | | | | | | | | | ANTIBODY; CHAIN: A, C; METAL | CHELATASE, CATALYTIC |
| | | | | | | | | | CHELATASE CATALYTIC | ANTIBODY, FAB FRAGMENT, |
| | | | | | | | | | ANTIBODY; CHAIN: B, D; | IMMUNE 2 SYSTEM |
| 318 | 3ncm | A | 168 | 245 | 4.5e−09 | 0.09 | −0.14 | | NEURAL CELL ADHESION | CELL ADHESION PROTEIN NCAM |
| | | | | | | | | | MOLECULE, LARGE ISOFORM; | MODULE 2; CELL ADHESION. |
| | | | | | | | | | CHAIN: A; | GLYCOPROTEIN, HEPARIN-BINDING, |
| | | | | | | | | | | GPI-ANCHOR, 2 NEURAL ADHESION |
| | | | | | | | | | | MOLECULE, IMMUNOGLOBULIN |
| | | | | | | | | | | FOLD, HOMOPHILIC 3 BINDING, |
| | | | | | | | | | | CELL ADHESION PROTEIN |
| 318 | 7fab | L | 40 | 241 | 1.7e−26 | 0.00 | 0.17 | | IMMUNOGLOBULIN | |
| | | | | | | | | | IMMUNOGLOBULIN FAB' NEW | |
| | | | | | | | | | (LAMBDA LIGHT CHAIN) 7FAB 3 | |
| 318 | 8fab | A | 43 | 241 | 1.4e−26 | 0.39 | 0.18 | | IMMUNOGLOBULIN FAB | |
| | | | | | | | | | FRAGMENT FROM HUMAN | |
| | | | | | | | | | IMMUNOGLOBULIN IGG1 | |
| | | | | | | | | | (LAMBDA, HIL) 8FAB 3 | |
| 319 | 1cly | A | 8 | 171 | 1.4e−63 | | | 109.08 | RAS-RELATED PROTEIN RAP-1A; | SIGNALING PROTEIN GTP-BINDING |
| | | | | | | | | | CHAIN: A; PROTO-ONKOGENE | PROTEINS, PROTEIN-PROTEIN |
| | | | | | | | | | SERINE/THREONINE PROTEIN | COMPLEX, EFFECTORS |
| | | | | | | | | | KINASE CHAIN: B; | |
| 319 | 1cly | A | 9 | 171 | 1.4e−63 | 0.82 | 1.00 | | RAS-RELATED PROTEIN RAP-1A; | SIGNALING PROTEIN GTP-BINDING |
| | | | | | | | | | CHAIN: A; PROTO-ONKOGENE | PROTEINS, PROTEIN-PROTEIN |
| | | | | | | | | | SERINE/THREONINE PROTEIN | COMPLEX, EFFECTORS |
| | | | | | | | | | KINASE CHAIN: B; | |
| 319 | 1ctq | A | 8 | 172 | 6.8e−65 | | | 108.57 | TRANSFORMING PROTEIN P21/H- | SIGNALING PROTEIN G PROTEIN, |
| | | | | | | | | | RAS-1; CHAIN: A; | GTP HYDROLYSIS, KINETIC |
| | | | | | | | | | | CRYSTALLOGRAPHY, 2 SIGNALING |
| | | | | | | | | | | PROTEIN |
| 319 | 1ctq | A | 9 | 171 | 6.8e−65 | 0.88 | 1.00 | | TRANSFORMING PROTEIN P21/H- | SIGNALING PROTEIN G PROTEIN, |
| | | | | | | | | | RAS-1; CHAIN: A; | GTP HYDROLYSIS, KINETIC |
| | | | | | | | | | | CRYSTALLOGRAPHY, 2 SIGNALING |
| | | | | | | | | | | PROTEIN |
| 319 | 1cxz | A | 3 | 172 | 3.4e−55 | | | 108.33 | HIS-TAGGED TRANSFORMING | SIGNALING PROTEIN PROTEIN- |
| | | | | | | | | | PROTEIN RHOA(0-181); CHAIN: A; | PROTEIN COMPLEX, ANTIPARALLEL |
| | | | | | | | | | PKN; CHAIN: B; | COILED-COIL |
| 319 | 1d5c | A | 9 | 165 | 6e−67 | 0.83 | 1.00 | | RAB6 GTPASE; CHAIN: A; | ENDOCYTOSIS/EXOCYTOSIS G- |
| | | | | | | | | | | PROTEIN, GTPASE, RAB6, |
| | | | | | | | | | | VESICULAR TRAFFICKING |
| 319 | 1d5c | A | 9 | 169 | 5.1e−63 | 0.87 | 1.00 | | RAB6 GTPASE; CHAIN: A; | ENDOCYTOSIS/EXOCYTOSIS G- |
| | | | | | | | | | | PROTEIN, GTPASE, RAB6, |
| | | | | | | | | | | VESICULAR TRAFFICKING |
| 319 | 1ds6 | A | 9 | 170 | 1.5e−55 | 0.73 | 1.00 | | RAS-RELATED C3 BOTULINUM | SIGNALING PROTEIN P21-RAC2; RHO |
| | | | | | | | | | TOXIN SUBSTRATE 2; CHAIN: A; | GDI 2, RHO-GDI BETA, LY-GDI; BETA |
| | | | | | | | | | RHO GDP-DISSOCIATION | SANDWHICH, PROTEIN-PROTEIN |
| | | | | | | | | | INHIBITOR 2; CHAIN: B; | COMPLEX, G-DOMAIN, 2 |
| | | | | | | | | | | IMMUNOGLOBULIN FOLD, WALKER |
| | | | | | | | | | | FOLD, GTP-BINDING PROTEIN |
| 319 | 1ek0 | A | 9 | 169 | 5.1e−61 | 0.93 | 1.00 | | GTP-BINDING PROTEIN YPT51; | ENDOCYTOSIS/EXOCYTOSIS G |
| | | | | | | | | | CHAIN: A; | PROTEIN, VESICULAR TRAFFIC, GTP |
| | | | | | | | | | | HYDROLYSIS, YPT/RAB 2 PROTEIN, |
| | | | | | | | | | | ENDOCYTOSIS, HYDROLASE |
| 319 | 1kao | | 8 | 172 | 1.2e−59 | | | 109.78 | RAP2A; CHAIN: NULL; | GTP-BINDING PROTEIN GTP- |
| | | | | | | | | | | BINDING PROTEIN, SMALL G |
| | | | | | | | | | | PROTEIN, RAP2, GDP, RAS |
| 319 | 1kao | | 9 | 169 | 1.2e−59 | 0.96 | 1.00 | | RAP2A; CHAIN: NULL; | GTP-BINDING PROTEIN GTP- |
| | | | | | | | | | | BINDING PROTEIN, SMALL G |
| | | | | | | | | | | PROTEIN, RAP2, GDP, RAS |
| 319 | 1tx4 | B | 6 | 170 | 1.1e−56 | | | 97.67 | P50-RHOGAP; CHAIN: A; | COMPLEX(GTPASE |
| | | | | | | | | | TRANSFORMING PROTEIN RHOA; | ACTIVATN/PROTO-ONCOGENE) |
| | | | | | | | | | CHAIN: B; | GTPASE-ACTIVATING PROTEIN |
| | | | | | | | | | | RHOGAP; COMPLEX (GTPASE |
| | | | | | | | | | | ACTIVATION/PROTO-ONCOGENE). |
| | | | | | | | | | | GTPASE, 2 TRANSITION STATE. GAP |
| 319 | 1tx4 | B | 7 | 170 | 1.1e−56 | 0.65 | 1.00 | | P50-RHOGAP; CHAIN: A; | COMPLEX(GTPASE |
| | | | | | | | | | TRANSFORMING PROTEIN RHOA; | ACTIVATN/PROTO-ONCOGENE) |
| | | | | | | | | | CHAIN: B; | GTPASE-ACTIVATING PROTEIN |
| | | | | | | | | | | RHOGAP; COMPLEX (GTPASE |
| | | | | | | | | | | ACTIVATION/PROTO-ONCOGENE), |
| | | | | | | | | | | GTPASE, 2 TRANSITION STATE, GAP |
| 319 | 1zbd | A | 3 | 178 | 5.1e−70 | | | 154.65 | RAB-3A; CHAIN: A; RABPHILIN- | COMPLEX (GTP-BINDING/EFFECTOR) |
| | | | | | | | | | 3A; CHAIN: B; | RAS-RELATED PROTEIN RAB3A; |
| | | | | | | | | | | COMPLEX (GTP- |
| | | | | | | | | | | BINDING/EFFECTOR), G PROTEIN, |
| | | | | | | | | | | EFFECTOR, RABCDR, 2 SYNAPTIC |
| | | | | | | | | | | EXOCYTOSIS, RAB PROTEIN, RAB3A, |
| | | | | | | | | | | RABPHILIN |
| 319 | 1zbd | A | 5 | 175 | 5.1e−70 | 0.92 | 1.00 | | RAB-3A; CHAIN: A; RABPHILIN- | COMPLEX (GTP-BINDING/EFFECTOR) |
| | | | | | | | | | 3A; CHAIN: B; | RAS-RELATED PROTEIN RAB3A; |
| | | | | | | | | | | COMPLEX (GTP- |
| | | | | | | | | | | BINDING/EFFECTOR), G PROTEIN, |
| | | | | | | | | | | EFFECTOR, RABCDR, 2 SYNAPTIC |
| | | | | | | | | | | EXOCYTOSIS, RAB PROTEIN, RAB3A, |
| | | | | | | | | | | RABPHILIN |
| 319 | 3rab | A | 4 | 172 | 1.5e−70 | 0.71 | 1.00 | | RAB3A; CHAIN: A; | HYDROLASE G PROTEIN, |
| | | | | | | | | | | VESICULAR TRAFFICKING, GTP |
| | | | | | | | | | | HYDROLYSIS, RAB 2 PROTEIN, |
| | | | | | | | | | | NEUROTRANSMITTER RELEASE, |
| | | | | | | | | | | HYDROLASE |
| 319 | 3rab | A | 4 | 172 | 1.5e−70 | | | 170.48 | RAB3A; CHAIN: A; | HYDROLASE G PROTEIN, |
| | | | | | | | | | | VESICULAR TRAFFICKING, GTP |
| | | | | | | | | | | HYDROLYSIS, RAB 2 PROTEIN, |
| | | | | | | | | | | NEUROTRANSMITTER RELEASE, |
| | | | | | | | | | | HYDROLASE |
| 321 | 1b0x | A | 227 | 287 | 1.5e−05 | 1.26 | 0.99 | | EPHA4 RECEPTOR TYROSINE | TRANSFERASE RECEPTOR |
| | | | | | | | | | KINASE; CHAIN: A; | TYROSINE KINASE, PROTEIN |
| | | | | | | | | | | INTERACTION MODULE, 2 |
| | | | | | | | | | | DIMERIZATION DOMAIN, |
| | | | | | | | | | | TRANSFERASE |
| 321 | 1b4f | A | 226 | 297 | 1.2e−13 | 0.85 | 0.74 | | EPHB2; CHAIN: A, B, C, D, E, F, G, | SIGNAL TRANSDUCTION SAM |
| | | | | | | | | | H; | DOMAIN, EPH RECEPTOR, SIGNAL |
| | | | | | | | | | | TRANSDUCTION, OLIGOMER |
| 321 | 1sgg | | 226 | 287 | 3e−06 | 0.84 | 0.92 | | EPHRIN TYPE-B RECEPTOR 2; | TYROSINE-PROTEIN KINASE NMR, |
| | | | | | | | | | CHAIN: NULL; | RECEPTOR OLIGOMERIZATION, EPH |
| | | | | | | | | | | RECEPTORS, TYROSINE 2 |
| | | | | | | | | | | PHOSPHORYLATION, SIGNAL |
| | | | | | | | | | | TRANSDUCTION, TYROSINE- |
| | | | | | | | | | | PROTEIN 3 KINASE |
| 323 | 1a17 | | 114 | 266 | 3.4e−12 | 0.15 | 0.43 | | SERINE/THREONINE PROTEIN | HYDROLASE TETRATRICOPEPTIDE, |
| | | | | | | | | | PHOSPHATASE 5; CHAIN: NULL; | TRP; HYDROLASE, PHOSPHATASE, |
| | | | | | | | | | | PROTEIN-PROTEIN INTERACTIONS, |
| | | | | | | | | | | TPR, 2 SUPER-HELIX, X-RAY |
| | | | | | | | | | | STRUCTURE |
| 323 | 1a17 | | 130 | 279 | 4.5e−14 | 0.30 | −0.01 | | SERINE/THREONINE PROTEIN | HYDROLASE TETRATRICOPEPTIDE, |
| | | | | | | | | | PHOSPHATASE 5; CHAIN: NULL; | TRP; HYDROLASE, PHOSPHATASE, |
| | | | | | | | | | | PROTEIN-PROTEIN INTERACTIONS, |
| | | | | | | | | | | TPR, 2 SUPER-HELIX, X-RAY |
| | | | | | | | | | | STRUCTURE |
| 323 | 1a17 | | 157 | 318 | 6e−08 | 0.17 | −0.02 | | SERINE/THREONINE PROTEIN | HYDROLASE TETRATRICOPEPTIDE, |
| | | | | | | | | | PHOSPHATASE 5; CHAIN: NULL; | TRP; HYDROLASE, PHOSPHATASE, |
| | | | | | | | | | | PROTEIN-PROTEIN INTERACTIONS, |
| | | | | | | | | | | TPR, 2 SUPER-HELIX, X-RAY |
| | | | | | | | | | | STRUCTURE |
| 323 | 1a17 | | 246 | 380 | 6.8e−13 | 0.22 | 0.22 | | SERINE/THREONINE PROTEIN | HYDROLASE TETRATRICOPEPTIDE, |
| | | | | | | | | | PHOSPHATASE 5; CHAIN: NULL; | TRP; HYDROLASE, PHOSPHATASE, |
| | | | | | | | | | | PROTEIN-PROTEIN INTERACTIONS, |
| | | | | | | | | | | TPR, 2 SUPER-HELIX, X-RAY |
| | | | | | | | | | | STRUCTURE |
| 323 | 1a17 | | 293 | 400 | 1.7e−13 | 0.34 | −0.12 | | SERINE/THREONINE PROTEIN | HYDROLASE TETRATRICOPEPTIDE, |
| | | | | | | | | | PHOSPHATASE 5; CHAIN: NULL; | TRP; HYDROLASE, PHOSPHATASE, |
| | | | | | | | | | | PROTEIN-PROTEIN INTERACTIONS, |
| | | | | | | | | | | TPR, 2 SUPER-HELIX, X-RAY |
| | | | | | | | | | | STRUCTURE |
| 323 | 1a17 | | 4 | 143 | 5.1e−16 | 0.43 | 0.07 | | SERINE/THREONINE PROTEIN | HYDROLASE TETRATRICOPEPTIDE, |
| | | | | | | | | | PHOSPHATASE 5; CHAIN: NULL; | TRP; HYDROLASE, PHOSPHATASE, |
| | | | | | | | | | | PROTEIN-PROTEIN INTERACTIONS, |
| | | | | | | | | | | TPR, 2 SUPER-HELIX, X-RAY |
| | | | | | | | | | | STRUCTURE |
| 323 | 1b89 | A | 11 | 275 | 0.00017 | 0.05 | 0.04 | | CLATHRIN HEAVY CHAIN: | CLATHRIN CLATHRIN, TRISKELION, |
| | | | | | | | | | CHAIN: A; | COATED VESICLES, ENDOCYTOSIS, |
| | | | | | | | | | | SELF-2 ASSEMBLY, ALPHA-ALPHA |
| | | | | | | | | | | SUPERHELIX |
| 323 | 1e96 | B | 162 | 318 | 6.8e−11 | 0.31 | 0.11 | | RAS-RELATED C3 BOTULINUM | SIGNALLING COMPLEX RAC1: |
| | | | | | | | | | TOXIN SUBSTRATE 1; CHAIN: A; | P67PHOX; SIGNALLING COMPLEX, |
| | | | | | | | | | NEUTROPHIL CYTOSOL FACTOR | GTPASE, NADPH OXIDASE, PROTEIN- |
| | | | | | | | | | 2 (NCF-2) CHAIN: B; | PROTEIN 2 COMPLEX, TPR MOTIF |
| 323 | 1e96 | B | 2 | 109 | 6.8e−10 | 0.31 | −0.06 | | RAS-RELATED C3 BOTULINUM | SIGNALLING COMPLEX RAC1; |
| | | | | | | | | | TOXIN SUBSTRATE 1; CHAIN: A; | P67PHOX; SIGNALLING COMPLEX, |
| | | | | | | | | | NEUTROPHIL CYTOSOL FACTOR | GTPASE, NADPH OXIDASE, PROTEIN- |
| | | | | | | | | | 2 (NCF-2) CHAIN: B; | PROTEIN 2 COMPLEX, TPR MOTIF |
| 323 | 1e96 | B | 245 | 392 | 1.2e−08 | 0.16 | −0.14 | | RAS-RELATED C3 BOTULINUM | SIGNALLING COMPLEX RAC1; |
| | | | | | | | | | TOXIN SUBSTRATE 1; CHAIN: A; | P67PHOX; SIGNALLING COMPLEX, |
| | | | | | | | | | NEUTROPHIL CYTOSOL FACTOR | GTPASE, NADPH OXIDASE, PROTEIN- |
| | | | | | | | | | 2 (NCF-2) CHAIN: B; | PROTEIN 2 COMPLEX, TPR MOTIF |
| 323 | 1e96 | B | 82 | 232 | 1.2e−10 | 0.27 | −0.02 | | RAS-RELATED C3 BOTULINUM | SIGNALLING COMPLEX RAC1; |
| | | | | | | | | | TOXIN SUBSTRATE 1; CHAIN: A; | P67PHOX; SIGNALLING COMPLEX, |
| | | | | | | | | | NEUTROPHIL CYTOSOL FACTOR | GTPASE, NADPH OXIDASE, PROTEIN- |
| | | | | | | | | | 2 (NCF-2) CHAIN: B; | PROTEIN 2 COMPLEX, TPR MOTIF |
| 323 | 1elr | A | 11 | 114 | 1.7e−15 | 0.50 | 0.90 | | TPR2A-DOMAIN OF HOP; CHAIN: | CHAPERONE HOP, TPR-DOMAIN, |
| | | | | | | | | | A; HSP90-PEPTIDE MEEVD; | PEPTIDE-COMPLEX, HELICAL |
| | | | | | | | | | CHAIN: B; | REPEAT, HSP90, 2 PROTEIN BINDING |
| 323 | 1elr | A | 121 | 233 | 1.2e−12 | 0.42 | 0.22 | | TPR2A-DOMAIN OF HOP; CHAIN: | CHAPERONE HOP, TPR-DOMAIN, |
| | | | | | | | | | A; HSP90-PEPTIDE MEEVD; | PEPTIDE-COMPLEX, HELICAL |
| | | | | | | | | | CHAIN: B; | REPEAT, HSP90, 2 PROTEIN BINDING |
| 323 | 1elr | A | 169 | 274 | 3.4e−13 | 0.04 | 0.06 | | TPR2A-DOMAIN OF HOP; CHAIN: | CHAPERONE HOP, TPR-DOMAIN. |
| | | | | | | | | | A; HSP90-PEPTIDE MEEVD; | PEPTIDE-COMPLEX, HELICAL |
| | | | | | | | | | CHAIN: B; | REPEAT, HSP90, 2 PROTEIN BINDING |
| 323 | 1elr | A | 1 | 74 | 1e−09 | 0.40 | −0.01 | | TPR2A-DOMAIN OF HOP; CHAIN: | CHAPERONE HOP, TPR-DOMAIN. |
| | | | | | | | | | A; HSP90-PEPTIDE MEEVD; | PEPTIDE-COMPLEX, HELICAL |
| | | | | | | | | | CHAIN: B; | REPEAT, HSP90, 2 PROTEIN BINDING |
| 323 | 1elr | A | 212 | 313 | 1.2e−15 | 0.58 | −0.05 | | TPR2A-DOMAIN OF HOP; CHAIN: | CHAPERONE HOP, TPR-DOMAIN, |
| | | | | | | | | | A; HSP90-PEPTIDE MEEVD; | PEPTIDE-COMPLEX, HELICAL |
| | | | | | | | | | CHAIN: B; | REPEAT, HSP90, 2 PROTEIN BINDING |
| 323 | 1elr | A | 252 | 356 | 1.2e−13 | 0.05 | 0.05 | | TPR2A-DOMAIN OF HOP; CHAIN: | CHAPERONE HOP, TPR-DOMAIN, |
| | | | | | | | | | A; HSP90-PEPTIDE MEEVD; | PEPTIDE-COMPLEX, HELICAL |
| | | | | | | | | | CHAIN: B; | REPEAT, HSP90, 2 PROTEIN BINDING |
| 323 | 1elr | A | 332 | 411 | 1e−11 | 0.04 | −0.18 | | TPR2A-DOMAIN OF HOP; CHAIN: | CHAPERONE HOP, TPR-DOMAIN, |
| | | | | | | | | | A; HSP90-PEPTIDE MEEVD; | PEPTIDE-COMPLEX, HELICAL |
| | | | | | | | | | CHAIN: B; | REPEAT, HSP90, 2 PROTEIN BINDING |
| 323 | 1elr | A | 56 | 157 | 1.5e−07 | −0.03 | 0.21 | | TPR2A-DOMAIN OF HOP; CHAIN: | CHAPERONE HOP, TPR-DOMAIN, |
| | | | | | | | | | A; HSP90-PEPTIDE MEEVD; | PEPTIDE-COMPLEX, HELICAL |
| | | | | | | | | | CHAIN: B; | REPEAT, HSP90, 2 PROTEIN BINDING |
| 323 | 1elr | A | 88 | 194 | 1.7e−13 | 0.19 | 0.28 | | TPR2A-DOMAIN OF HOP; CHAIN: | CHAPERONE HOP, TPR-DOMAIN, |
| | | | | | | | | | A: HSP90-PEPTIDE MEEVD; | PEPTIDE-COMPLEX, HELICAL |
| | | | | | | | | | CHAIN: B; | REPEAT, HSP90, 2 PROTEIN BINDING |
| 323 | 1elw | A | 126 | 244 | 3.4e−11 | 0.18 | 0.81 | | TPR1-DOMAIN OF HOP; CHAIN: A, | CHAPERONE HOP, TPR-DOMAIN. |
| | | | | | | | | | B: HSC70-PEPTIDE; CHAIN: C, D; | PEPTIDE-COMPLEX, HELICAL |
| | | | | | | | | | | REPEAT, HSC70, 2 HSP70, PROTEIN |
| | | | | | | | | | | BINDING |
| 323 | 1elw | A | 249 | 366 | 1e−11 | 0.20 | 0.19 | | TPR1-DOMAIN OF HOP; CHAIN: A, | CHAPERONE HOP, TPR-DOMAIN. |
| | | | | | | | | | B: HSC70-PEPTIDE; CHAIN: C, D; | PEPTIDE-COMPLEX, HELICAL |
| | | | | | | | | | | REPEAT, HSC70, 2 HSP70, PROTEIN |
| | | | | | | | | | | BINDING |
| 323 | 1elw | A | 293 | 393 | 3.4e−11 | 0.29 | −0.08 | | TPR1-DOMAIN OF HOP; CHAIN: A, | CHAPERONE HOP, TPR-DOMAIN, |
| | | | | | | | | | B; HSC70-PEPTIDE; CHAIN: C, D; | PEPTIDE-COMPLEX, HELICAL |
| | | | | | | | | | | REPEAT, HSC70, 2 HSP70, PROTEIN |
| | | | | | | | | | | BINDING |
| 323 | 1elw | A | 4 | 121 | 3.4e−14 | 0.56 | 0.62 | | TPR1-DOMAIN OF HOP; CHAIN: A, | CHAPERONE HOP, TPR-DOMAIN, |
| | | | | | | | | | B; HSC70-PEPTIDE; CHAIN: C, D; | PEPTIDE-COMPLEX, HELICAL |
| | | | | | | | | | | REPEAT, HSC70, 2 HSP70, PROTEIN |
| | | | | | | | | | | BINDING |
| 323 | 1elw | A | 81 | 208 | 1.2e−08 | 0.18 | −0.11 | | TPR1-DOMAIN OF HOP; CHAIN: A, | CHAPERONE HOP, TPR-DOMAIN, |
| | | | | | | | | | B; HSC70-PEPTIDE; CHAIN: C, D; | PEPTIDE-COMPLEX, HELICAL |
| | | | | | | | | | | REPEAT, HSC70, 2 HSP70, PROTEIN |
| | | | | | | | | | | BINDING |
| 323 | 1fch | A | 104 | 410 | 1e−31 | 0.02 | −0.02 | | PEROXISOMAL TARGETING | SIGNALING PROTEIN PEROXISMORE |
| | | | | | | | | | SIGNAL 1 RECEPTOR; CHAIN: A, | RECEPTOR 1, PTS1-BP, PEROXIN-5, |
| | | | | | | | | | B; PTS1-CONTAINING PEPTIDE; | PTS1 PROTEIN-PEPTIDE COMPLEX, |
| | | | | | | | | | CHAIN: C, D; | TETRATRICOPEPTIDE REPEAT, TPR, |
| | | | | | | | | | | 2 HELICAL REPEAT |
| 323 | 1fch | A | 11 | 317 | 1.2e−29 | 0.37 | 0.87 | | PEROXISOMAL TARGETING | SIGNALING PROTEIN PEROXISMORE |
| | | | | | | | | | SIGNAL 1 RECEPTOR; CHAIN: A, | RECEPTOR 1, PTS1-BP, PEROXIN-5, |
| | | | | | | | | | B; PTSI-CONTAINING PEPTIDE; | PTS1 PROTEIN-PEPTIDE COMPLEX, |
| | | | | | | | | | CHAIN: C, D; | TETRATRICOPEPTIDE REPEAT, TPR, |
| | | | | | | | | | | 2 HELICAL REPEAT |
| 323 | 1fch | A | 2 | 263 | 3.4e−23 | 0.36 | 0.99 | | PEROXISOMAL TARGETING | SIGNALING PROTEIN PEROXISMORE |
| | | | | | | | | | SIGNAL 1 RECEPTOR; CHAIN: A, | RECEPTOR 1, PTS1-BP, PEROXIN-5, |
| | | | | | | | | | B; PTS1-CONTAINING PEPTIDE; | PTS1 PROTEIN-PEPTIDE COMPLEX, |
| | | | | | | | | | CHAIN: C, D; | TETRATRICOPEPTIDE REPEAT, TPR, |
| | | | | | | | | | | 2 HELICAL REPEAT |
| 323 | 1qqe | A | 120 | 375 | 3.4e−10 | 0.14 | 0.58 | | VESICULAR TRANSPORT | PROTEIN TRANSPORT HELIX-TURN- |
| | | | | | | | | | PROTEIN SEC17; CHAIN: A; | HELIX TPR-LIKE REPEAT, PROTEIN |
| | | | | | | | | | | TRANSPORT |
| 323 | 1qqe | A | 221 | 388 | 3.4e−10 | 0.01 | −0.09 | | VESICULAR TRANSPORT | PROTEIN TRANSPORT HELIX-TURN- |
| | | | | | | | | | PROTEIN SEC17; CHAIN: A; | HELIX TPR-LIKE REPEAT, PROTEIN |
| | | | | | | | | | | TRANSPORT |
| 323 | 1qqe | A | 3 | 188 | 1e−11 | 0.48 | 0.19 | | VESICULAR TRANSPORT | PROTEIN TRANSPORT HELIX-TURN- |
| | | | | | | | | | PROTEIN SEC17; CHAIN: A; | HELIX TPR-LIKE REPEAT, PROTEIN |
| | | | | | | | | | | TRANSPORT |
| 323 | 1qqe | A | 68 | 359 | 3.4e−10 | | | 54.55 | VESICULAR TRANSPORT | PROTEIN TRANSPORT HELIX-TURN- |
| | | | | | | | | | PROTEIN SEC17; CHAIN: A; | HELIX TPR-LIKE REPEAT, PROTEIN |
| | | | | | | | | | | TRANSPORT |
| 324 | 1b4f | A | 28 | 74 | 0.00045 | 0.19 | 0.90 | | EPHB2; CHAIN: A, B, C, D, E, F, G, | SIGNAL TRANSDUCTION SAM |
| | | | | | | | | | H; | DOMAIN, EPH RECEPTOR, SIGNAL |
| | | | | | | | | | | TRANSDUCTION, OLIGOMER |
| 329 | 1b7f | A | 421 | 559 | 5.1e−20 | −0.15 | 0.98 | | SXL-LETHAL PROTEIN; CHAIN: A, | RNA-BINDING PROTEIN/RNA TRA |
| | | | | | | | | | B; RNA (5′- | PRE-MRNA; SPLICING REGULATION, |
| | | | | | | | | | R(P*GP*UP*UP*GP*UP*UP*UP*UP | RNP DOMAIN, RNA COMPLEX |
| | | | | | | | | | *UP*UP*UP*U)- CHAIN: P, Q; | |
| 329 | 1cvj | A | 423 | 547 | 1.7e−21 | 0.00 | 0.52 | | POLYDENYLATE BINDING | GENE REGULATION/RNA POLY(A) |
| | | | | | | | | | PROTEIN 1; CHAIN: A, B, C, D, E, | BINDING PROTEIN 1, PABP 1; RRM, |
| | | | | | | | | | F, G, H; RNA (5′- | PROTEIN-RNA COMPLEX, GENE |
| | | | | | | | | | R(*AP*AP*AP*AP*AP*AP*AP*AP* | REGULATION/RNA |
| | | | | | | | | | AP*AP*A)-3′); CHAIN: M, N, O, P, | |
| | | | | | | | | | Q, R, S, T; | |
| 329 | 1cvj | B | 423 | 535 | 3.4e−20 | 0.09 | 0.63 | | POLYDENYLATE BINDING | GENE REGULATION/RNA POLY(A) |
| | | | | | | | | | PROTEIN 1; CHAIN: A, B, C, D, E, | BINDING PROTEIN 1, PABP 1; RRM, |
| | | | | | | | | | F, G, H; RNA (5′- | PROTEIN-RNA COMPLEX, GENE |
| | | | | | | | | | R(*AP*AP*AP*AP*AP*AP*AP*AP* | REGULATION/RNA |
| | | | | | | | | | AP*AP*A)-3′); CHAIN: M, N, O, P, | |
| | | | | | | | | | Q, R, S, T; | |
| 329 | 1cvj | F | 423 | 502 | 3.4e−17 | 054 | 0.87 | | POLYDENYLATE BINDING | GENE REGULATION/RNA POLY(A) |
| | | | | | | | | | PROTEIN 1; CHAIN: A, B, C, D, E, | BINDING PROTEIN 1, PABP 1; RRM, |
| | | | | | | | | | F, G, H; RNA (5′- | PROTEIN-RNA COMPLEX, GENE |
| | | | | | | | | | R(*AP*AP*AP*AP*AP*AP*AP*AP* | REGULATION/RNA |
| | | | | | | | | | AP*AP*A)-3′); CHAIN: M, N, O, P, | |
| | | | | | | | | | Q, R, S, T; | |
| 329 | 1cvj | H | 423 | 535 | 1.4e−17 | −0.03 | 0.49 | | POLYDENYLATE BINDING | GENE REGULATION/RNA POLY(A) |
| | | | | | | | | | PROTEIN 1; CHAIN: A, B, C, D, E, | BINDING PROTEIN 1, PABP 1; RRM, |
| | | | | | | | | | F, G, H; RNA (5′- | PROTEIN-RNA COMPLEX, GENE |
| | | | | | | | | | R(*AP*AP*AP*AP*AP*AP*AP*AP* | REGULATION/RNA |
| | | | | | | | | | AP*AP*A)-3′); CHAIN: M, N, O, P, | |
| | | | | | | | | | Q, R, S, T; | |
| 329 | 1d8z | A | 418 | 496 | 6.8e−19 | 012 | 0.82 | | HU ANTIGEN C; CHAIN: A; | RNA BINDING PROTEIN RNA- |
| | | | | | | | | | | BINDING DOMAIN |
| 329 | 1hal | | 416 | 544 | 1.7e−17 | −0.01 | 0.03 | | HNRNP A1; CHAIN: NULL; | NUCLEAR PROTEIN |
| | | | | | | | | | | HETEROGENEOUS NUCLEAR |
| | | | | | | | | | | RIBONUCLEOPROTEIN A1, NUCLEAR |
| | | | | | | | | | | PROTEIN, HNRNP, RBD, RRM, RNP, |
| | | | | | | | | | | RNA BINDING, 2 |
| | | | | | | | | | | RIBONUCLEOPROTEIN |
| 329 | 2sxl | | 421 | 496 | 1.2e−16 | 0.37 | 0.96 | | SEX-LETHAL PROTEIN; CHAIN: | RNA-BINDING DOMAIN RNA- |
| | | | | | | | | | NULL; | BINDING DOMAIN, ALTERNATIVE |
| | | | | | | | | | | SPLICING |
| 329 | 2upl | A | 415 | 550 | 1e−17 | −0.04 | 0.05 | | HETEROGENEOUS NUCLEAR | COMPLEX |
| | | | | | | | | | RIBONUCLEOPROTEIN A1; | (RIBONUCLEOPROTEIN/DNA) HNRNP |
| | | | | | | | | | CHAIN: A; 12-NUCLEOTIDE | A1, UPI; COMPLEX |
| | | | | | | | | | SINGLE-STRANDED TELOMETRIC | (RIBONUCLEOPROTEIN/DNA). |
| | | | | | | | | | DNA; CHAIN: B; | HETEROGENEOUS NUCLEAR 2 |
| | | | | | | | | | | RIBONUCLEOPROTEIN A1 |
| 329 | 3sxl | A | 421 | 559 | 1.7e−19 | 0.05 | 0.89 | | SEX-LETHAL; CHAIN: A, B, C, | RNA BINDING DOMAIN RNA |
| | | | | | | | | | | BINDING DOMAIN, RBD, RNA |
| | | | | | | | | | | RECOGNITION MOTIF, RRM, 2 |
| | | | | | | | | | | SPLICING INHIBITOR, |
| | | | | | | | | | | TRANSLATIONAL INHIBITOR, SEX 3 |
| | | | | | | | | | | DETERMINATION, X CHROMOSOME |
| | | | | | | | | | | DOSAGE COMPENSATION |
| 332 | 1adq | L | 57 | 268 | 6e−98 | 0.86 | 1.00 | | IGG4 REA; CHAIN: A; RF-AN | COMPLEX |
| | | | | | | | | | IGM/LAMBDA; CHAIN: H, L; | (IMMUNOGLOBULIN/AUTOANTIGEN) |
| | | | | | | | | | | COMPLEX |
| | | | | | | | | | | (IMMUNOGLOBULIN/AUTOANTIGEN), |
| | | | | | | | | | | RHEUMATOID FACTOR 2 AUTO- |
| | | | | | | | | | | ANTIBODY COMPLEX |
| 332 | 1adq | L | 57 | 268 | 6e−98 | | | 301.73 | IGG4 REA; CHAIN: A; RF-AN | COMPLEX |
| | | | | | | | | | IGM/LAMBDA; CHAIN: H, L; | (IMMUNOGLOBULIN/AUTOANTIGEN) |
| | | | | | | | | | | COMPLEX |
| | | | | | | | | | | (IMMUNOGLOBULIN/AUTOANTIGEN), |
| | | | | | | | | | | RHEUMATOID FACTOR 2 AUTO- |
| | | | | | | | | | | ANTIBODY COMPLEX |
| 332 | 1aqk | L | 56 | 268 | 6.8e−88 | | | 318.27 | FAB B7-15A2; CHAIN: L, H; | IMMUNOGLOBULIN HUMAN FAB, |
| | | | | | | | | | | ANTI-TETANUS TOXOID, HIGH |
| | | | | | | | | | | AFFINITY, CRYSTAL 2 PACKING |
| | | | | | | | | | | MOTIF, PROGRAMMING |
| | | | | | | | | | | PROPENSITY TO CRYSTALLIZE. 3 |
| | | | | | | | | | | IMMUNOGLOBULIN |
| 332 | 1b2w | L | 55 | 267 | 5.1e−90 | 0.76 | 1.00 | | ANTIBODY (LIGHT CHAIN); | IMMUNE SYSTEM |
| | | | | | | | | | CHAIN: L; ANTIBODY (HEAVY | IMMUNOGLOBULIN; |
| | | | | | | | | | CHAIN); CHAIN: H; | IMMUNOGLOBULIN ANTIBODY |
| | | | | | | | | | | ENGINEERING, HUMANIZED AND |
| | | | | | | | | | | CHIMERIC ANTIBODY, FAB, 2 X-RAY |
| | | | | | | | | | | STRUCTURE, THREE-DIMENSIONAL |
| | | | | | | | | | | STRYCTURE, GAMMA-3 |
| | | | | | | | | | | INTERFERON, IMMUNE SYSTEM |
| 332 | 1bjm | A | 55 | 268 | 3.4e−85 | | | 322.11 | LOC-LAMBDA 1 TYPE LIGHT- | IMMUNOGLOBULIN BENCE-JONES |
| | | | | | | | | | CHAIN DIMER; 1BJM 6 CHAIN: A, | PROTEIN; 1BJM 8 BENCE JONES, |
| | | | | | | | | | B; 1BJM 7 | ANTIBODY, MULTIPLE |
| | | | | | | | | | | QUATERNARY STRUCTURES 1BJM 13 |
| 332 | 1bwm | A | 7 | 161 | 3.4e−21 | −0.07 | 0.33 | | ALPHA-BETA T CELL RECEPTOR | IMMUNE SYSTEM |
| | | | | | | | | | (TCR) (D10); CHAIN: A; | IMMUNOGLOBULIN, |
| | | | | | | | | | | IMMUNORECEPTOR, IMMUNE |
| | | | | | | | | | | SYSTEM |
| 332 | 1dee | A | 55 | 267 | 1e−90 | 0.84 | 1.00 | | IGM RF 2A2; CHAIN: A, C, E; IGM | IMMUNE SYSTEM FAB-IBP COMPLEX |
| | | | | | | | | | RF 2A2; CHAIN: B, D, F; | CRYSTAL STRUCTURE 2.7A |
| | | | | | | | | | IMMUNOGLOBULIN G BINDING | RESOLUTION BINDING 2 OUTSIDE |
| | | | | | | | | | PROTEIN A; CHAIN: G, H; | THE ANTIGEN COMBINING SITE |
| | | | | | | | | | | SUPERANTIGEN FAB VH3 3 |
| | | | | | | | | | | SPECIFICITY |
| 332 | 1dzb | A | 1 | 162 | 5.1e−60 | 0.09 | 0.46 | | SCFV FRAGMENT IF9; CHAIN: A, | COMPLEX (ANTIBODY ANTIGEN) 1,4- |
| | | | | | | | | | B; TURKEY EGG-WHITE | BETA-N-ACETYLMURAMIDASE C; |
| | | | | | | | | | LYSOZYME C; CHAIN: X, Y; | SINGLE-DOMAIN ANTIBODY, |
| | | | | | | | | | | TURKEY EGG-WHITE LYSOZYME, 2 |
| | | | | | | | | | | ANTIBODY-PROTEIN COMPLEX, |
| | | | | | | | | | | SINGLE-CHAIN FV FRAGMENT |
| 332 | 1f3r | B | 1 | 164 | 1.4e−61 | 0.14 | 0.98 | | ACETYLCHOLINE RECEPTOR | IMMUNE SYSTEM IG-FOLD, IMMUNO |
| | | | | | | | | | ALPHA: CHAIN: A; FV ANTIBODY | COMPLEX, ANTIBODY-ANTIGEN. |
| | | | | | | | | | FRAGMENT; CHAIN: B; | BETA-TURN |
| 332 | 1igl | A | 55 | 267 | 1.2e−89 | 0.68 | 1.00 | | IGG2A INTACT ANTIBODY- | IMMUNOGLOBULIN INTACT |
| | | | | | | | | | MAB231; CHAIN: A, B, C, D | IMMUNOGLOBULIN V REGION C |
| | | | | | | | | | | REGION, IMMUNOGLOBULIN |
| 332 | 1lil | A | 57 | 268 | 4.5e−99 | 086 | 1.00 | | LAMBDA III BENCE JONES | IMMUNOGLOBULIN |
| | | | | | | | | | PROTEIN CLE; CHAIN: A, B | IMMUNOGLOBULIN, BENCE JONES |
| | | | | | | | | | | PROTEIN |
| 332 | 1lil | A | 58 | 268 | 4.5e−99 | | | 299.68 | LAMBDA III BENCE JONES | IMMUNOGLOBULIN |
| | | | | | | | | | PROTEIN CLE; CHAIN: A, B | IMMUNOGLOBULIN, BENCE JONES |
| | | | | | | | | | | PROTEIN |
| 332 | 1lmk | A | 1 | 162 | 3.4e−59 | 0.12 | 0.92 | | IMMUNOGLOBULIN ANTI- | |
| | | | | | | | | | PHOSPHATIDYLINOSITOL | |
| | | | | | | | | | SPECIFIC PHOSPHOLIPASE C | |
| | | | | | | | | | DIABODY 1LMK 3 SYNONYMS: | |
| | | | | | | | | | L5MK16 DIABODY, SINGLE- | |
| | | | | | | | | | CHAIN FV DIMER 1LMK 4 | |
| 332 | 1mcp | L | 55 | 267 | 3.4e−91 | 0.79 | 1.00 | | IMMUNOGLOBULIN | |
| | | | | | | | | | IMMUNOGLOBULIN FAB | |
| | | | | | | | | | FRAGMENT (MC/PC$603) 1MCP 4 | |
| 332 | 1mcp | L | 55 | 267 | 3.4e−91 | | | 202.00 | IMMUNOGLOBULIN | |
| | | | | | | | | | IMMUNOGLOBULIN FAB | |
| | | | | | | | | | FRAGMENT (MC/PC$603) 1MCP 4 | |
| 332 | 1mcw | W | 55 | 268 | 1e−82 | | | 294.22 | IMMUNOGLOBULIN | |
| | | | | | | | | | IMMUNOGLOBULIN | |
| | | | | | | | | | HETEROLOGOUS LIGHT CHAIN | |
| | | | | | | | | | DIMER IMCW 3 (/MCG$-/WEIR$ | |
| | | | | | | | | | HYBRID) 1MCW 4 | |
| 332 | 1mfa | | 1 | 161 | 3.4e−21 | −0.34 | 0.01 | | IMMUNOGLOBULIN FV | |
| | | | | | | | | | FRAGMENT (MURINE SE155-4) | |
| | | | | | | | | | COMPLEX WITH THE | |
| | | | | | | | | | TRISACCHARIDE: 1MFA 3 | |
| | | | | | | | | | ALPHA-D-GALACTOSE(1-2) | |
| | | | | | | | | | [ALPHA-D-ABEQUOSE(1-3)] | |
| | | | | | | | | | ALPHA-1MFA 4 D-MANNOSE | |
| | | | | | | | | | (PI-OME) (PART OF THE CELL- | |
| | | | | | | | | | SURFACE CARBOHYDRATE | |
| | | | | | | | | | 1MFA 5 OF PATHOGENIC | |
| | | | | | | | | | SALMONELLA) 1MFA 6 | |
| 332 | 1nca | L | 55 | 267 | 5.1e−91 | 0.78 | 1.00 | | HYDROLASE(O-GLYCOSYL)N9 | |
| | | | | | | | | | NEURAMINIDASE-NC4I | |
| | | | | | | | | | (E.C.3.2.1.18) COMPLEX WITH FAB | |
| | | | | | | | | | 1NCA 3 | |
| 332 | 1nqb | A | 1 | 163 | 5.1e−61 | 0.17 | 0.53 | | SINGLE-CHAIN ANTIBODY | IMMUNOGLOBULIN VARIABLE |
| | | | | | | | | | FRAGMENT; CHAIN: A, C; | HEAVY (VH) DOMAIN, VARIABLE |
| | | | | | | | | | | LIGHT (VL) ANTIBODY FRAGMENT, |
| | | | | | | | | | | MULTIVALENT ANTIBODY, |
| | | | | | | | | | | DIABODY, DOMAIN 2 SWAPPING, |
| | | | | | | | | | | IMMUNOGLOBULIN |
| 332 | 1qlr | A | 55 | 267 | 1.5e−89 | 0.65 | 1.00 | | IGM KAPPA CHAIN V-III (KAU | IMMUNOGLOBULIN |
| | | | | | | | | | COLD AGGLUTININ); CHAIN: A, | IMMUNOGLOBULIN, |
| | | | | | | | | | C; IGM FAB REGION IV-J(H4)-C | AUTOANTIBODY, COLD |
| | | | | | | | | | (KAU COLD AGGLUTININ); | AGGLUTININ, HUMAN IGM 2 FAB |
| | | | | | | | | | CHAIN: B, D; | FRAGMENT |
| 332 | 1qok | A | 1 | 162 | 1.7e−61 | 0.45 | 0.42 | | MFE-23 RECOMBINANT | IMMUNOGLOBULIN |
| | | | | | | | | | ANTIBODY FRAGMENT; CHAIN: | IMMUNOGLOBULIN, SINGLE-CHAIN |
| | | | | | | | | | A; | FV, ANTI-CARCINOEMBRYONIC 2 |
| | | | | | | | | | | ANTIGEN |
| 332 | 1sbs | L | 55 | 267 | 3.4e−92 | 0.89 | 1.00 | | MONOCLONAL ANTIBODY 3A2; | MONOCLONAL ANTIBODY |
| | | | | | | | | | CHAIN: H, L; | MONOCLONAL ANTIBODY, FAB- |
| | | | | | | | | | | FRAGMENT, REPRODUCTION |
| 332 | 2fb4 | L | 55 | 268 | 6.8e−87 | | | 326.11 | IMMUNOGLOBULIN | |
| | | | | | | | | | IMMUNOGLOBULIN FAB 2FB4 4 | |
| 332 | 2mcg | L | 55 | 268 | 1.7e−86 | | | 304.84 | IMMUNOGLOBULIN | |
| | | | | | | | | | IMMUNOGLOBULIN LAMBDA | |
| | | | | | | | | | LIGHT CHAIN DIMER (/MCG$) | |
| | | | | | | | | | 2MCG 3 (TRIGONAL FORM) 2MCG 4 | |
| 332 | 7fab | L | 55 | 264 | 3e−95 | | | 290.47 | IMMUNOGLOBULIN | |
| | | | | | | | | | IMMUNOGLOBULIN FAB' NEW | |
| | | | | | | | | | (LAMBDA LIGHT CHAIN) 7FAB 3 | |
| 332 | 7fab | L | 56 | 264 | 3e−95 | 0.85 | 1.00 | | IMMUNOGLOBULIN | |
| | | | | | | | | | IMMUNOGLOBULIN FAB' NEW | |
| | | | | | | | | | (LAMBDA LIGHT CHAIN) 7FAB 3 | |
| 332 | 8fab | A | 58 | 264 | 5.1e−87 | | | 291.96 | IMMUNOGLOBULIN FAB | |
| | | | | | | | | | FRAGMENT FROM HUMAN | |
| | | | | | | | | | IMMUNOGLOBULIN IGGI | |
| | | | | | | | | | (LAMBDA, HIL) 8FAB 3 | |
| 338 | 1fl3 | L | 39 | 117 | 0.00034 | −0.04 | 0.22 | | BLUE FLUORESCENT ANTIBODY | IMMUNE SYSTEM |
| | | | | | | | | | (19G2)-HEAVY CHAIN; CHAIN: H, | IMMUNOGLOBULIN FOLD |
| | | | | | | | | | A; BLUE FLUORESCENT | |
| | | | | | | | | | ANTIBODY (19G2)-LIGHT CHAIN; | |
| | | | | | | | | | CHAIN: L, B; | |
| 342 | 1ekl | A | 225 | 349 | 3.4e−14 | −0.04 | 0.19 | | EPOXIDE HYDROLASE; CHAIN: A, | HYDROLASE HOMODIMER, |
| | | | | | | | | | B; | ALPHA/BETA HYDROLASE FOLD, |
| | | | | | | | | | | DISUBSTITUTED UREA 2 INHIBITOR |
| 342 | 1ek1 | B | 132 | 349 | 1.5e−17 | 0.25 | 0.54 | | EPOXIDE HYDROLASE; CHAIN: A, | HYDROLASE HOMODIMER, |
| | | | | | | | | | B; | ALPHA/BETA HYDROLASE FOLD, |
| | | | | | | | | | | DISUBSTITUTED UREA 2 INHIBITOR |
| 342 | 1fez | A | 130 | 330 | 4.5e−29 | 0.37 | 0.82 | | PHOSPHONOACETALDEHYDE | HYDROLASE HAD-FAMILY |
| | | | | | | | | | HYDROLASE; CHAIN: A, B, C, D; | ALPHA/BETA CORE DOMAIN, MG(II) |
| | | | | | | | | | | BINDING SITE, 5-2 HELIX BUNDLE |
| 342 | 1fez | A | 130 | 366 | 1.5e−23 | 0.56 | 1.00 | | PHOSPHONOACETALDEHYDE | HYDROLASE HAD-FAMILY |
| | | | | | | | | | HYDROLASE; CHAIN: A, B, C, D; | ALPHA/BETA CORE DOMAIN, MG(II) |
| | | | | | | | | | | BINDING SITE, 5-2 HELIX BUNDLE |
| 342 | 1qq5 | A | 130 | 386 | 3.4e−26 | | | 51.58 | L-2-HALOACID DEHALOGENASE; | HYDROLASE L-2-HALOACID |
| | | | | | | | | | CHAIN: A, B; | DEHALOGENASE, HYDROLASE |
| 342 | 1qq5 | A | 131 | 362 | 3.4e−26 | 0.32 | 0.65 | | L-2-HALOACID DEHALOGENASE; | HYDROLASE L-2-HALOACID |
| | | | | | | | | | CHAIN: A, B; | DEHALOGENASE, HYDROLASE |
| 342 | 1zrn | | 130 | 362 | 1.7e−28 | | | 57.26 | L-2-HALOACID DEHALOGENASE; | DEHALOGENASE DEHALOGENASE, |
| | | | | | | | | | CHAIN: NULL; | HYDROLASE |
| 342 | 1zrn | | 131 | 361 | 1.7e−28 | 0.29 | 0.76 | | L-2-HALOACID DEHALOGENASE; | DEHALOGENASE DEHALOGENASE, |
| | | | | | | | | | CHAIN: NULL; | HYDROLASE |
| 343 | 1alh | A | 129 | 213 | 8.5e−24 | 0.05 | −0.05 | | QGSR ZINC FINGER PEPTIDE; | COMPLEX (ZINC FINGER/DNA) |
| | | | | | | | | | CHAIN: A; DUPLEX | COMPLEX (ZINC FINGER/DNA), ZINC |
| | | | | | | | | | OLIGONUCLEOTIDE BINDING | FINGER, DNA-BINDING PROTEIN |
| | | | | | | | | | SITE; CHAIN: B, C; | |
| 343 | 1alh | A | 161 | 241 | 3.4e−30 | 0.13 | 0.12 | | QGSR ZINC FINGER PEPTlDE; | COMPLEX (ZINC FINGER/DNA) |
| | | | | | | | | | CHAIN: A; DUPLEX | COMPLEX (ZINC FINGER/DNA), ZINC |
| | | | | | | | | | OLIGONUCLEOTIDE BINDING | FINGER, DNA-BINDING PROTEIN |
| | | | | | | | | | SITE; CHAIN: B, C; | |
| 343 | 1mey | C | 145 | 213 | 3.4e−38 | −0.21 | 0.10 | | DNA; CHAIN: A, B, D, E; | COMPLEX (ZINC FINGER/DNA) ZINC |
| | | | | | | | | | CONSENSUS ZINC FINGER | FINGER, PROTEIN-DNA |
| | | | | | | | | | PROTEIN: CHAIN; C, F, G; | INTERACTION, PROTEIN DESIGN, 2 |
| | | | | | | | | | | CRYSTAL STRUCTURE, COMPLEX |
| | | | | | | | | | | (ZINC FINGER/DNA) |
| 343 | 1mey | C | 160 | 241 | 6.8e−50 | 0.09 | 0.54 | | DNA; CHAIN: A, B, D, E; | COMPLEX (ZINC FINGER/DNA) ZINC |
| | | | | | | | | | CONSENSUS ZINC FINGER | FINGER, PROTEIN-DNA |
| | | | | | | | | | PROTEIN; CHAIN: C, F, G; | INTERACTION, PROTEIN DESIGN, 2 |
| | | | | | | | | | | CRYSTAL STRUCTURE, COMPLEX |
| | | | | | | | | | | (ZINC FINGER/DNA) |
| 343 | 1mey | C | 188 | 269 | 5.1e−50 | −0.08 | 0.89 | | DNA; CHAIN: A, B, D, E; | COMPLEX (ZINC FINGER/DNA) ZINC |
| | | | | | | | | | CONSENSUS ZINC FINGER | FINGER, PROTEIN-DNA |
| | | | | | | | | | PROTEIN; CHAIN: C, F, G; | INTERACTION, PROTEIN DESIGN, 2 |
| | | | | | | | | | | CRYSTAL STRUCTURE, COMPLEX |
| | | | | | | | | | | (ZINC FINGER/DNA) |
| 343 | 1mey | C | 216 | 297 | 5.1e−50 | 0.20 | 1.00 | | DNA; CHAIN: A, B, D, E; | COMPLEX (ZINC FINGER/DNA) ZINC |
| | | | | | | | | | CONSENSUS ZINC FINGER | FINGER, PROTEIN-DNA |
| | | | | | | | | | PROTEIN; CHAIN: C, F, G; | INTERACTION, PROTEIN DESIGN, 2 |
| | | | | | | | | | | CRYSTAL STRUCTURE, COMPLEX |
| | | | | | | | | | | (ZINC FINGER/DNA) |
| 343 | 1mey | C | 244 | 325 | 3.4e−50 | 0.22 | 1.00 | | DNA; CHAIN: A, B, D, E; | COMPLEX (ZINC FINGER/DNA) ZINC |
| | | | | | | | | | CONSENSUS ZINC FINGER | FINGER, PROTEIN-DNA |
| | | | | | | | | | PROTEIN; CHAIN: C, F, G; | INTERACTION, PROTEIN DESIGN, 2 |
| | | | | | | | | | | CRYSTAL STRUCTURE, COMPLEX |
| | | | | | | | | | | (ZINC FINGER/DNA) |
| 343 | 1mey | C | 272 | 353 | 1.4e−49 | 0.47 | 1.00 | | DNA; CHAIN: A, B, D, E; | COMPLEX (ZINC FINGER/DNA) ZINC |
| | | | | | | | | | CONSENSUS ZINC FINGER | FINGER, PROTEIN-DNA |
| | | | | | | | | | PROTEIN; CHAIN: C, F, G: | INTERACTION, PROTEIN DESIGN, 2 |
| | | | | | | | | | | CRYSTAL STRUCTURE COMPLEX |
| | | | | | | | | | | (ZINC FINGER/DNA) |
| 343 | 1mey | C | 272 | 354 | 3.4e−50 | | | 103.55 | DNA; CHAIN: A, B, D, E; | COMPLEX (ZINC FINGER/DNA) ZINC |
| | | | | | | | | | CONSENSUS ZINC FINGER | FINGER, PROTEIN-DNA |
| | | | | | | | | | PROTEIN; CHAIN: C, F, G; | INTERACTION, PROTEIN DESIGN, 2 |
| | | | | | | | | | | CRYSTAL STRUCTURE, COMPLEX |
| | | | | | | | | | | (ZINC FINGER/DNA) |
| 343 | 1mey | C | 300 | 357 | 3.4e−33 | 0.42 | 1.00 | | DNA; CHAIN: A, B, D, E; | COMPLEX (ZINC FINGER/DNA) ZINC |
| | | | | | | | | | CONSENSUS ZINC FINGER | FINGER, PROTEIN-DNA |
| | | | | | | | | | PROTEIN; CHAIN: C, F, G; | INTERACTION, PROTEIN DESIGN, 2 |
| | | | | | | | | | | CRYSTAL STRUCTURE, COMPLEX |
| | | | | | | | | | | (ZINC FINGER/DNA) |
| 343 | 1mey | C | 39 | 142 | 5.1e−43 | −0.12 | 0.00 | | DNA; CHAIN: A, B, D, E; | COMPLEX (ZINC FINGER/DNA) ZINC |
| | | | | | | | | | CONSENSUS ZINC FINGER | FINGER, PROTEIN-DNA |
| | | | | | | | | | PROTEIN; CHAIN: C, F, G; | INTERACTION, PROTEIN DESIGN, 2 |
| | | | | | | | | | | CRYSTAL STRUCTURE, COMPLEX |
| | | | | | | | | | | (ZINC FINGER/DNA) |
| 343 | 1mey | G | 158 | 185 | 1.2e−12 | 0.50 | 0.71 | | DNA; CHAIN: A, B, D, E; | COMPLEX (ZINC FINGER/DNA) ZINC |
| | | | | | | | | | CONSENSUS ZINC FINGER | FINGER, PROTEIN-DNA |
| | | | | | | | | | PROTEIN; CHAIN: C, F, G; | INTERACTION, PROTEIN DESIGN, 2 |
| | | | | | | | | | | CRYSTAL STRUCTURE, COMPLEX |
| | | | | | | | | | | (ZINC FINGER/DNA) |
| 343 | 1mey | G | 37 | 64 | 1.7e−11 | −0.39 | 0.13 | | DNA; CHAIN: A, B, D, E; | COMPLEX (ZINC FINGER/DNA) ZINC |
| | | | | | | | | | CONSENSUS ZINC FINGER | FINGER, PROTEIN-DNA |
| | | | | | | | | | PROTEIN; CHAIN: C, F, G; | INTERACTION, PROTEIN DESIGN, 2 |
| | | | | | | | | | | CRYSTAL STRUCTURE, COMPLEX |
| | | | | | | | | | | (ZINC FINGER/DNA) |
| 343 | 1tf6 | A | 161 | 313 | 8.5e−38 | −0.20 | 0.66 | | TFIIIA; CHAIN: A, D; 5S | COMPLEX (TRANSCRIPTION |
| | | | | | | | | | RIBOSOMAL RNA GENE; CHAIN: | REGULATION/DNA) COMPLEX |
| | | | | | | | | | B, C, E, F; | (TRANSCRIPTION |
| | | | | | | | | | | REGULATION/DNA), RNA |
| | | | | | | | | | | POLYMERASE III, 2 TRANSCRIPTION |
| | | | | | | | | | | INITIATION, ZINC FINGER PROTEIN |
| 343 | 1tf6 | A | 187 | 353 | 8.5e−38 | | | 89.34 | TFIIIA; CHAIN: A, D; 5S | COMPLEX (TRANSCRIPTION |
| | | | | | | | | | RIBOSOMAL RNA GENE; CHAIN: | REGULATION/DNA) COMPLEX |
| | | | | | | | | | B, C, E, F; | (TRANSCRIPTION |
| | | | | | | | | | | REGULATION/DNA), RNA |
| | | | | | | | | | | POLYMERASE III, 2 TRANSCRIPTION |
| | | | | | | | | | | INITIATION, ZINC FINGER PROTEIN |
| 343 | 1tf6 | A | 217 | 355 | 3.4e−35 | 0.13 | 1.00 | | TFIIIA: CHAIN: A, D: 5S | COMPLEX (TRANSCRIPTION |
| | | | | | | | | | RIBOSOMAL RNA GENE: CHAIN: | REGULATION/DNA) COMPLEX |
| | | | | | | | | | B, C, E, F; | (TRANSCRIPTION |
| | | | | | | | | | | REGULATION/DNA), RNA |
| | | | | | | | | | | POLYMERASE III, 2 TRANSCRIPTION |
| | | | | | | | | | | INITIATION, ZINC FINGER PROTEIN |
| 343 | 1ubd | C | 168 | 269 | 5.1e−35 | −0.19 | 0.69 | | YY1: CHAIN: C; ADENO- | COMPLEX (TRANSCRIPTION |
| | | | | | | | | | ASSOCIATED VIRUS P5 | REGULATION/DNA) YING-YANG 1: |
| | | | | | | | | | INITIATOR ELEMENT DNA; | TRANSCRIPTION INITIATION, |
| | | | | | | | | | CHAIN: A, B; | INITIATOR ELEMENT, YY1, ZINC 2 |
| | | | | | | | | | | FINGER PROTEIN, DNA-PROTEIN |
| | | | | | | | | | | RECOGNITION, 3 COMPLEX |
| | | | | | | | | | | (TRANSCRIPTION |
| | | | | | | | | | | REGULATION/DNA) |
| 343 | 1ubd | C | 214 | 325 | 1.2e−52 | −0.09 | 0.93 | | YY1; CHAIN: C; ADENO- | COMPLEX (TRANSCRIPTION |
| | | | | | | | | | ASSOCIATED VIRUS P5 | REGULATION/DNA) YING-YANG 1; |
| | | | | | | | | | INITIATOR ELEMENT DNA; | TRANSCRIPTION INITIATION, |
| | | | | | | | | | CHAIN: A, B; | INITIATOR ELEMENT, YY1, ZINC 2 |
| | | | | | | | | | | FINGER PROTEIN, DNA-PROTEIN |
| | | | | | | | | | | RECOGNITION, 3 COMPLEX |
| | | | | | | | | | | (TRANSCRIPTION |
| | | | | | | | | | | REGULATION/DNA) |
| 343 | 1ubd | C | 242 | 353 | 6e−53 | 0.03 | 0.99 | | YY1; CHAIN: C; ADENO- | COMPLEX (TRANSCRIPTION |
| | | | | | | | | | ASSOCIATED VIRUS P5 | REGULATION/DNA) YING-YANG 1; |
| | | | | | | | | | INITIATOR ELEMENT DNA; | TRANSCRIPTION INITIATION, |
| | | | | | | | | | CHAIN: A, B; | INITIATOR ELEMENT, YY1, ZINC 2 |
| | | | | | | | | | | FINGER PROTEIN, DNA-PROTEIN |
| | | | | | | | | | | RECOGNITION, 3 COMPLEX |
| | | | | | | | | | | (TRANSCRIPTION |
| | | | | | | | | | | REGULATION/DNA) |
| 343 | 1ubd | C | 244 | 354 | 6e−53 | | | 86.36 | YY1; CHAIN: C; ADENO- | COMPLEX (TRANSCRIPTION |
| | | | | | | | | | ASSOCIATED VIRUS P5 | REGULATION/DNA) YING-YANG 1; |
| | | | | | | | | | INITIATOR ELEMENT DNA; | TRANSCRIPTION INITIATION, |
| | | | | | | | | | CHAIN: A, B; | INITIATOR ELEMENT, YY1, ZINC 2 |
| | | | | | | | | | | FINGER PROTEIN, DNA-PROTEIN |
| | | | | | | | | | | RECOGNITION, 3 COMPLEX |
| | | | | | | | | | | (TRANSCRIPTION |
| | | | | | | | | | | REGULATION/DNA) |
| 343 | 1ubd | C | 252 | 353 | 6.8e−34 | 0.09 | 1.00 | | YY1; CHAIN: C; ADENO- | COMPLEX (TRANSCRIPTION |
| | | | | | | | | | ASSOCIATED VIRUS P5 | REGULATION/DNA) YING-YANG 1; |
| | | | | | | | | | INITIATOR ELEMENT DNA; | TRANSCRIPTION INITIATION, |
| | | | | | | | | | CHAIN: A, B; | INITIATOR ELEMENT, YY1, ZINC 2 |
| | | | | | | | | | | FINGER PROTEIN, DNA-PROTEIN |
| | | | | | | | | | | RECOGNITION, 3 COMPLEX |
| | | | | | | | | | | (TRANSCRIPTION |
| | | | | | | | | | | REGULATION/DNA) |
| 343 | 2gli | A | 157 | 268 | 1.2e−31 | 0.00 | 0.27 | | ZINC FINGER PROTEIN GLI1; | COMPLEX (DNA-BINDING |
| | | | | | | | | | CHAIN: A; DNA; CHAIN: C, D; | PROTEIN/DNA) FIVE-FINGER GLI; |
| | | | | | | | | | | GLI, ZINC FINGER, COMPLEX (DNA- |
| | | | | | | | | | | BINDING PROTEIN/DNA) |
| 343 | 2gli | A | 188 | 327 | 1.2e−61 | 0.41 | 1.00 | | ZINC FINGER PROTEIN GLI1; | COMPLEX (DNA-BINDING |
| | | | | | | | | | CHAIN: A; DNA; CHAIN: C, D; | PROTEIN/DNA) FIVE-FINGER GLI; |
| | | | | | | | | | | GLI, ZINC FINGER, COMPLEX (DNA- |
| | | | | | | | | | | BINDING PROTEIN/DNA) |
| 343 | 2gli | A | 216 | 353 | 1.5e−67 | 0.42 | 0.99 | | ZINC FINGER PROTEIN GLI1; | COMPLEX (DNA-BINDING |
| | | | | | | | | | CHAIN: A; DNA; CHAIN: C, D; | PROTEIN/DNA) FIVE-FINGER GLI; |
| | | | | | | | | | | GLI, ZINC FINGER, COMPLEX (DNA- |
| | | | | | | | | | | BINDING PROTEIN/DNA) |
| 343 | 2gli | A | 216 | 355 | 1.5e−67 | | | 95.61 | ZINC FINGER PROTEIN GLI1; | COMPLEX (DNA-BINDING |
| | | | | | | | | | CHAIN: A; DNA; CHAIN: C, D; | PROTEIN/DNA) FIVE-FINGER GLI; |
| | | | | | | | | | | GLI, ZINC FINGER, COMPLEX (DNA- |
| | | | | | | | | | | BINDING PROTEIN/DNA) |
| 343 | 2gli | A | 224 | 352 | 3.4e−33 | 0.43 | 0.98 | | ZINC FINGER PROTEIN GLI1; | COMPLEX (DNA-BINDING |
| | | | | | | | | | CHAIN: A; DNA; CHAIN: C, D; | PROTEIN/DNA) FIVE-FINGER GLI; |
| | | | | | | | | | | GLI, ZINC FINGER, COMPLEX (DNA- |
| | | | | | | | | | | BINDING PROTEIN/DNA) |
| 343 | 2gli | A | 40 | 243 | 3e−23 | −0.10 | 0.00 | | ZINC FINGER PROTEIN GLI1; | COMPLEX (DNA-BINDING |
| | | | | | | | | | CHAIN: A: DNA: CHAIN: C. D: | PROTEIN/DNA) FIVE-FINGER GL1; |
| | | | | | | | | | | GL1, ZINC FINGER, COMPLEX (DNA- |
| | | | | | | | | | | BINDING PROTEIN/DNA) |
| 345 | 1bbz | A | 7 | 63 | 4.5e−15 | −0.10 | 0.72 | | ABL TYROSINEKINASE; CHAIN: | COMPLEX (TRANSFERASE/PEPTIDE) |
| | | | | | | | | | A, C, E, G; PEPTIDE P41; CHAIN: B, | COMPLEX (TRANSFERASE/PEPTIDE), |
| | | | | | | | | | D, F, H; | SIGNAL TRANSDUCTION, 2 SH3 |
| | | | | | | | | | | DOMAIN |
| 345 | 1gbq | A | 8 | 63 | 3e−16 | −0.22 | 0.88 | | GRB2; CHAIN: A; SOS-1; CHAIN: B; | COMPLEX (SIGNAL |
| | | | | | | | | | | TRANSDUCTION/PEPTIDE) COMPLEX |
| | | | | | | | | | | (SIGNAL TRANSDUCTION/PEPTIDE), |
| | | | | | | | | | | SH3 DOMAIN |
| 345 | 1gbr | A | 8 | 65 | 3e−16 | −0.04 | 0.98 | | SIGNAL TRANSDUCTION | |
| | | | | | | | | | PROTEIN GROWTH FACTOR | |
| | | | | | | | | | RECEPTOR-BOUND PROTEIN 2 | |
| | | | | | | | | | (GRB2, N-TERMINAL 1GBR 3 SH3 | |
| | | | | | | | | | DOMAIN) COMPLEXED WITH | |
| | | | | | | | | | SOS-A PEPTIDE 1GBR 4 (NMR, 29 | |
| | | | | | | | | | STRUCTURES) 1GBR 5 | |
| 345 | 1gfc | | 8 | 63 | 3e−15 | 0.27 | 0.89 | | ADAPTOR PROTEIN CONTAINING | |
| | | | | | | | | | SH2 AND SH3 GROWTH FACTOR | |
| | | | | | | | | | RECEPTOR-BOUND PROTEIN 2 | |
| | | | | | | | | | (GRB2) 1GFC 3 (C-TERMINAL SH3 | |
| | | | | | | | | | DOMAIN) (NMR, MINIMIZED | |
| | | | | | | | | | MEAN STRUCTURE) 1GFC 4 | |
| 345 | 1pht | | 8 | 71 | 1.2e−15 | −0.32 | 0.33 | | PHOSPHATIDYLINOSITOL 3- | PHOSPHOTRANSFERASE P13K SH3; |
| | | | | | | | | | KINASE P85-ALPHA SUBUNIT; | 1PHT 9 PHOSPHATIDYLINOSITOL 3- |
| | | | | | | | | | 1PHT 6 CHAIN: NULL; 1PHT 7 | KINASE, P85-ALPHA SUBUNIT, SH3 |
| | | | | | | | | | | DOMAIN 1PHT 21 |
| 345 | 1pks | | 8 | 63 | 1.5e−14 | −0.24 | 0.30 | | PHOSPHOTRANSFERASE | |
| | | | | | | | | | PHOSPHATIDYLINOSITOL 3- | |
| | | | | | | | | | KINASE (E.C.2.7.1.137) (P13K) 1PKS | |
| | | | | | | | | | 3 (SH3 DOMAIN) (NMR, | |
| | | | | | | | | | MINIMIZED AVERAGE | |
| | | | | | | | | | STRUCTURE) 1PKS 4 | |
| 345 | 1pwt | | 1 | 63 | 7.5e−16 | −0.09 | 0.99 | | ALPHA SPECTRIN; CHAIN: NULL; | CIRCULAR PERMUTANT PWT; |
| | | | | | | | | | | CIRCULAR PERMUTANT, SH3 |
| | | | | | | | | | | DOMAIN, CYTOSKELETON |
| 345 | 1qkw | A | 8 | 63 | 7.5e−16 | 0.13 | 0.98 | | ALPHA II SPECTRIN; CHAIN: A; | CYTOSKELETON CYTOSKELETON, |
| | | | | | | | | | | MEMBRANE, SH3 DOMAIN |
| 345 | 1sem | A | 8 | 58 | 6e−15 | 0.30 | 0.92 | | SEM-5; 1SEM 3 CHAIN: A, B; 1SEM | SIGNAL TRANSDUCTION PROTEIN |
| | | | | | | | | | 5 10-RESIDUE PROLINE-RICH | SRC-HOMOLOGY 3 (SH3) DOMAIN, |
| | | | | | | | | | PEPTIDE FROM MSOS 1SEM 8 | PEPTIDE-BINDING PROTEIN, 1SEM 18 |
| | | | | | | | | | CHAIN: C, D 1SEM 10 | 2 GUANINE NUCLEOTIDE |
| | | | | | | | | | | EXCHANGE FACTOR 1SEM 19 |
| 348 | 2occ | K | 30 | 78 | 8.5e−27 | −0.76 | 0.60 | | CYTOCHROME C OXIDASE; | OXIDOREDUCTASE |
| | | | | | | | | | CHAIN: A, B, C, D, E, F, G, H, I, J, K, | FERROCYTOCHROME C\:OXYGEN |
| | | | | | | | | | L, M, N, O, P, Q, | OXIDOREDUCTASE; |
| | | | | | | | | | | OXIDOREDUCTASE, |
| | | | | | | | | | | CYTOCHROME(C)-OXYGEN, |
| | | | | | | | | | | CYTOCHROME C 2 OXIDASE |
| 348 | 2occ | K | 30 | 78 | 8.5e−27 | | | 69.07 | CYTOCHROME C OXIDASE; | OXIDOREDUCTASE |
| | | | | | | | | | CHAIN: A, B, C, D, E, F, G, H, I, J, K, | FERROCYTOCHROME C\:OXYGEN |
| | | | | | | | | | L, M, N, O, P, Q, | OXIDOREDUCTASE; |
| | | | | | | | | | | OXIDOREDUCTASE, |
| | | | | | | | | | | CYTOCHROME(C)-OXYGEN, |
| | | | | | | | | | | CYTOCHROME C 2 OXIDASE |
| 355 | 1bxe | A | 66 | 175 | 5.1e−43 | 0.90 | 1.00 | | RIBOSOMAL PROTEIN L22; | RNA BINDING PROTEIN RIBOSOMAL |
| | | | | | | | | | CHAIN: A: | PROTEIN, PROTEIN SYNTHESIS, RNA |
| | | | | | | | | | | BINDING, 2 ANTIBIOTICS |
| | | | | | | | | | | RESISTANCE, RNA BINDING |
| | | | | | | | | | | PROTEIN |
| 355 | 1ffk | O | 54 | 174 | 3.4e−23 | 0.21 | 0.60 | | 23S RRNA; CHAIN: 0; 5S RRNA; | RIBOSOME 50S RIBOSOMAL |
| | | | | | | | | | CHAIN: 9; RIBOSOMAL PROTEIN | PROTEIN L2P, HMAL2, HL4: 50S |
| | | | | | | | | | L2; CHAIN: A; RIBOSOMAL | RIBOSOMAL PROTEIN L3P, HMAL3. |
| | | | | | | | | | PROTEIN L3; CHAIN: B; | HL1; 50S RIBOSOMAL PROTEIN L4E, |
| | | | | | | | | | RIBOSOMAL PROTEIN L4; CHAIN: | HMAL4, HL6; 50S RIBOSOMAL |
| | | | | | | | | | C: RIBOSOMAL PROTEIN L5; | PROTEIN L5P, HMAL5, HL13; 30S |
| | | | | | | | | | CHAIN: D; RIBOSOMAL PROTEIN | RIBOSOMAL PROTEIN HS6; 50S |
| | | | | | | | | | L7AE; CHAIN: E; RIBOSOMAL | RIBOSOMAL PROTEIN L13P, HMAL13; |
| | | | | | | | | | PROTEIN L10E; CHAIN: F; | 50S RIBOSOMAL PROTEIN L14P, |
| | | | | | | | | | RIBOSOMAL PROTEIN L13; | HMAL14, HL27; 50S RIBOSOMAL |
| | | | | | | | | | CHAIN: G; RIBOSOMAL PROTEIN | PROTEIN L15P, HMAL15, HL9; 50S |
| | | | | | | | | | L14; CHAIN: H; RIBOSOMAL | RIBOSOMAL PROTEIN L18P, HMAL18, |
| | | | | | | | | | PROTEIN L15E, CHAIN: I; | HL12; 50S RIBOSOMAL PROTEIN |
| | | | | | | | | | RIBOSOMAL PROTEIN L15; | L18E, HL29, L19; 50S RIBOSOMAL |
| | | | | | | | | | CHAIN: J; RIBOSOMAL PROTEIN | PROTEIN L19E, HMAL19, HL24; 50S |
| | | | | | | | | | L18; CHAIN: K; RIBOSOMAL | RIBOSOMAL PROTEIN L21E, HL31; |
| | | | | | | | | | PROTEIN L18E; CHAIN: L; | 50S RIBOSOMAL PROTEIN L22P, |
| | | | | | | | | | RIBOSOMAL PROTEIN L19; | HMAL22, HL23; 50S RIBOSOMAL |
| | | | | | | | | | CHAIN: M; RIBOSOMAL PROTEIN | PROTEIN L23P, HMAL23, HL25, L21; |
| | | | | | | | | | L21E; CHAIN: N; RIBOSOMAL | 50S RIBOSOMAL PROTEIN L24P, |
| | | | | | | | | | PROTEIN L22; CHAIN: O; | HMAL24, HL16, HL15; 50S |
| | | | | | | | | | RIBOSOMAL PROTEIN L23; | RIBOSOMAL PROTEIN L24E, |
| | | | | | | | | | CHAIN: P; RIBOSOMAL PROTEIN | HL21/HL22; 50S RIBOSOMAL |
| | | | | | | | | | L24; CHAIN: Q; RIBOSOMAL | PROTEIN L29P, HMAL29, HL33; 50S |
| | | | | | | | | | PROTEIN L24E; CHAIN: R; | RIBOSOMAL PROTEIN L30P, HMAL30, |
| | | | | | | | | | RIBOSOMAL PROTEIN L29; | HL20, HL16; 50S RIBOSOMAL |
| | | | | | | | | | CHAIN: S; RIBOSOMAL PROTEIN | PROTEIN L31E, L34, HL30; 50S |
| | | | | | | | | | L30; CHAIN: T; RIBOSOMAL | RIBOSOMAL PROTEIN L32E, HL5; 50S |
| | | | | | | | | | PROTEIN L31E; CHAIN: U; | RIBOSOMAL PROTEIN L37E, L35E; |
| | | | | | | | | | RIBOSOMAL PROTEIN L32E; | 50S RIBOSOMAL PROTEINS L39E, |
| | | | | | | | | | CHAIN: V; RIBOSOMAL PROTEIN | HL39E, HL46E; 50S RIBOSOMAL |
| | | | | | | | | | L37AE; CHAIN: W; RIBOSOMAL | PROTEIN L44E, LA, HLA; 50S |
| | | | | | | | | | PROTEIN L37E; CHAIN: X; | RIBOSOMAL PROTEIN L6P, HMAL6, |
| | | | | | | | | | RIBOSOMAL PROTEIN L39E; | HL10 RIBOSOME ASSEMBLY, RNA- |
| | | | | | | | | | CHAIN: Y; RIBOSOMAL PROTEIN | RNA, PROTEIN-RNA, PROTEIN- |
| | | | | | | | | | L44E; CHAIN: Z; RIBOSOMAL | PROTEIN |
| | | | | | | | | | PROTEIN L6; CHAIN: 1; | |
| 369 | 1d2h | A | 70 | 190 | 1.2e−14 | 0.20 | 0.17 | | GLYCINE N- | TRANSFERASE |
| | | | | | | | | | METHYLTRANSFERASE; CHAIN: | METHYLTRANSFERASE |
| | | | | | | | | | A, B, C, D; | |
| 369 | 2adm | A | 66 | 209 | 6.8e−13 | 0.14 | −0.11 | | ADENINE-N6-DNA- | METHYLTRANSFERASE |
| | | | | | | | | | METHYLTRANSFERASE TAQ1; | TRANSFERASE, |
| | | | | | | | | | CHAIN: A, B; | METHYLTRANSFERASE, |
| | | | | | | | | | | RESTRICTION SYSTEM |
| 371 | 1a02 | F | 108 | 160 | 4.5e−13 | −0.36 | 0.17 | | NFAT; CHAIN: N; C-FOS; CHAIN: | COMPLEX |
| | | | | | | | | | F; C-JUN; CHAIN: J; DNA; CHAIN: | (TRANSCRIPTION/NUCLEAR/NUCLEAR) |
| | | | | | | | | | A, B; | AR) NF-AT; TRANSCRIPTION |
| | | | | | | | | | | FACTOR, PROTEIN-DNA COMPLEX, |
| | | | | | | | | | | NFAT, NF-AT, 2 AP-I, FOS-JUN, |
| | | | | | | | | | | QUATERNARY PROTEIN-DNA |
| | | | | | | | | | | COMPLEX, CRYSTAL 3 STRUCTURE, |
| | | | | | | | | | | TRANSCRIPTION SYNERGY, |
| | | | | | | | | | | COMBINATORIAL GENE 4 |
| | | | | | | | | | | REGULATION, COMPLEX |
| | | | | | | | | | | (TRANSCRIPTION/NUCLEAR/NUCLEAR) |
| 371 | 1a02 | F | 108 | 160 | 4.5e−13 | | | 62.39 | NFAT; CHAIN: N; C-FOS; CHAIN: | COMPLEX |
| | | | | | | | | | F; C-JUN; CHAIN: J; DNA; CHAIN: | (TRANSCRIPTION/NUCLEAR/NUCLEAR) |
| | | | | | | | | | A, B; | NF-AT; TRANSCRIPTION |
| | | | | | | | | | | FACTOR, PROTEIN-DNA COMPLEX, |
| | | | | | | | | | | NFAT, NF-AT, 2 AP-1, FOS-JUN, |
| | | | | | | | | | | QUATERNARY PROTEIN-DNA |
| | | | | | | | | | | COMPLEX, CRYSTAL 3 STRUCTURE, |
| | | | | | | | | | | TRANSCRIPTION SYNERGY, |
| | | | | | | | | | | COMBINATORIAL GENE 4 |
| | | | | | | | | | | REGULATION, COMPLEX |
| | | | | | | | | | | (TRANSCRIPTION/NUCLEAR/NUCLEAR) |
| 371 | 1a02 | F | 115 | 146 | 3.4e−10 | −0.05 | 0.69 | | NFAT; CHAIN: N; C-FOS; CHAIN; | COMPLEX |
| | | | | | | | | | F; C-JUN; CHAIN: J; DNA; CHAIN: | (TRANSCRIPTION/NUCLEAR/NUCLEAR) |
| | | | | | | | | | A, B; | NF-AT; TRANSCRIPTION |
| | | | | | | | | | | FACTOR, PROTEIN-DNA COMPLEX, |
| | | | | | | | | | | NFAT, NF-AT, 2 AP-1, FOS-JUN. |
| | | | | | | | | | | QUATERNARY PROTEIN-DNA |
| | | | | | | | | | | COMPLEX, CRYSTAL 3 STRUCTURE, |
| | | | | | | | | | | TRANSCRIPTION SYNERGY, |
| | | | | | | | | | | COMBINATORIAL GENE 4 |
| | | | | | | | | | | REGULATION, COMPLEX |
| | | | | | | | | | | (TRANSCRIPTION/NUCLEAR/NUCLEAR) |
| 371 | 1fos | E | 107 | 166 | 3.4e−10 | | | 70.24 | COMPLEX (GENE-REGULATORY | |
| | | | | | | | | | PROTEIN/DNA) C-JUN PROTO- | |
| | | | | | | | | | ONCOGENE (TRANSCRIPTION | |
| | | | | | | | | | FACTOR AP-1) DIMERIZED IFOS 4 | |
| | | | | | | | | | WITH C-FOS AND COMPLEXED | |
| | | | | | | | | | WITH DNA IFOS 5 COILED-COIL, | |
| | | | | | | | | | DNA-BINDING PROTEIN, | |
| | | | | | | | | | HETERODIMER 1FOS 19 | |
| 371 | 1fos | E | 115 | 146 | 3.4e−10 | −0.39 | 0.76 | | COMPLEX(GENE-REGULATORY | |
| | | | | | | | | | PROTEIN/DNA) C-JUN PROTO- | |
| | | | | | | | | | ONCOGENE (TRANSCRIPTION | |
| | | | | | | | | | FACTOR AP-1) DIMERIZED 1FOS 4 | |
| | | | | | | | | | WITH C-FOS AND COMPLEXED | |
| | | | | | | | | | WITH DNA 1FOS 5 COILED-COIL, | |
| | | | | | | | | | DNA-BINDlNG PROTEIN, | |
| | | | | | | | | | HETERODIMER IFOS 19 | |
| 373 | 1d5t | A | 166 | 598 | 0 | 0.32 | 1.00 | | GUANINE NUCLEOTIDE | HYDROLASE INHIBITOR ULTRA- |
| | | | | | | | | | DISSOCIATION INHIBITOR: | HIGH RESOLUTION |
| | | | | | | | | | CHAIN: A; | |
| 373 | 1qo8 | A | 8 | 46 | 0.0045 | 0.01 | 0.17 | | FLAVOCYTOCHROME C3 | OXIDOREDUCTASE |
| | | | | | | | | | FUMARATE REDUCTASE; CHAIN: | OXIDOREDUCTASE |
| | | | | | | | | | A, D; | |
| 373 | 3lad | A | 8 | 48 | 0.006 | −0.12 | 0.36 | | OXIDOREDUCTASE | |
| | | | | | | | | | DIHYDROLIPOAMIDE | |
| | | | | | | | | | DEHYDROGENASE (E.C.1.8.1.4) | |
| | | | | | | | | | 3LAD 3 | |
| 374 | 1alh | A | 168 | 252 | 5.1e−15 | 0.00 | 0.05 | | QGSR ZINC FINGER PEPTIDE; | COMPLEX (ZINC FINGER/DNA) |
| | | | | | | | | | CHAIN: A; DUPLEX | COMPLEX (ZINC FINGER/DNA), ZINC |
| | | | | | | | | | OLIGONUCLEOTIDE BINDING | FINGER, DNA-BINDING PROTEIN |
| | | | | | | | | | SITE; CHAIN: B, C; | |
| 374 | 1alh | A | 188 | 280 | 6.8e−22 | −0.03 | 0.30 | | QGSR ZINC FINGER PEPTIDE: | COMPLEX (ZINC FINGER/DNA) |
| | | | | | | | | | CHAIN: A; DUPLEX | COMPLEX (ZINC FINGER/DNA), ZINC |
| | | | | | | | | | OLIGONUCLEOTIDE BINDING | FINGER, DNA-BINDING PROTEIN |
| | | | | | | | | | SITE; CHAIN: B, C; | |
| 374 | 1alh | A | 228 | 304 | 3.4e−23 | 0.60 | 0.12 | | QGSR ZINC FINGER PEPTIDE: | COMPLEX (ZINC FINGER/DNA) |
| | | | | | | | | | CHAIN: A; DUPLEX | COMPLEX (ZINC FINGER/DNA), ZINC |
| | | | | | | | | | OLIGONUCLEOTIDE BINDING | FINGER, DNA-BINDING PROTEIN |
| | | | | | | | | | SITE; CHAIN: B, C; | |
| 374 | 1alh | A | 308 | 388 | 1.2e−29 | −0.01 | 1.00 | | QGSR ZINC FINGER PEPTIDE; | COMPLEX (ZINC FINGER/DNA) |
| | | | | | | | | | CHAIN: A; DUPLEX | COMPLEX (ZINC FINGER/DNA), ZINC |
| | | | | | | | | | OLIGONUCLEOTIDE BINDING | FINGER, DNA-BINDING PROTEIN |
| | | | | | | | | | SITE; CHAIN: B, C; | |
| 374 | 1alh | A | 308 | 389 | 1.2e−32 | −0.32 | 1.00 | | QGSR ZINC FINGER PEPTIDE; | COMPLEX (ZINC FINGER/DNA) |
| | | | | | | | | | CHAIN: A; DUPLEX | COMPLEX (ZINC FINGER/DNA), ZINC |
| | | | | | | | | | OLIGONUCLEOTIDE BINDING | FINGER, DNA-BINDING PROTEIN |
| | | | | | | | | | SITE; CHAIN: B, C; | |
| 374 | 1alh | A | 336 | 416 | 1e−30 | 0.03 | 0.92 | | QGSR ZINC FINGER PEPTIDE; | COMPLEX (ZINC FINGER/DNA) |
| | | | | | | | | | CHAIN: A; DUPLEX | COMPLEX (ZINC FINGER/DNA), ZINC |
| | | | | | | | | | OLIGONUCLEOTIDE BINDING | FINGER, DNA-BINDING PROTEIN |
| | | | | | | | | | SITE; CHAIN: B, C; | |
| 374 | 1alh | A | 393 | 472 | 1.2e−37 | 0.64 | 1.00 | | QGSR ZINC FINGER PEPTIDE; | COMPLEX (ZINC FINGER/DNA) |
| | | | | | | | | | CHAIN: A; DUPLEX | COMPLEX (ZINC FINGER/DNA), ZINC |
| | | | | | | | | | OLIGONUCLEOTIDE BINDING | FINGER, DNA-BINDING PROTEIN |
| | | | | | | | | | SITE; CHAIN: B, C; | |
| 374 | 1alh | A | 420 | 502 | 1.2e−37 | | | 86.81 | QGSR ZINC FINGER PEPTIDE: | COMPLEX (ZINC FINGER/DNA) |
| | | | | | | | | | CHAIN: A; DUPLEX | COMPLEX (ZINC FINGER/DNA), ZINC |
| | | | | | | | | | OLIGONUCLEOTIDE BINDING | FINGER, DNA-BINDING PROTEIN |
| | | | | | | | | | SITE; CHAIN: B, C; | |
| 374 | 1alh | A | 476 | 556 | 1.2e−34 | 0.57 | 1.00 | | QGSR ZINC FINGER PEPTIDE; | COMPLEX (ZINC FINGER/DNA) |
| | | | | | | | | | CHAIN: A; DUPLEX | COMPLEX (ZINC FINGER/DNA), ZINC |
| | | | | | | | | | OLIGONUCLEOTIDE BINDING | FINGER, DNA-BINDING PROTEIN |
| | | | | | | | | | SITE; CHAIN: B, C; | |
| 374 | 1alh | A | 476 | 556 | 1.7e−31 | 0.43 | 1.00 | | QGSR ZINC FINGER PEPTIDE; | COMPLEX (ZINC FINGER/DNA) |
| | | | | | | | | | CHAIN: A; DUPLEX | COMPLEX (ZINC FINGER/DNA), ZINC |
| | | | | | | | | | OLIGONUCLEOTIDE BINDING | FINGER, DNA-BINDING PROTEIN |
| | | | | | | | | | SITE; CHAIN: B, C; | |
| 374 | 1mey | C | 186 | 280 | 3.4e−38 | 0.45 | 0.75 | | DNA; CHAIN: A, B, D, E; | COMPLEX (ZINC FINGER/DNA) ZINC |
| | | | | | | | | | CONSENSUS ZINC FINGER | FINGER, PROTEIN-DNA |
| | | | | | | | | | PROTEIN; CHAIN: C, F, G; | INTERACTION, PROTEIN DESIGN, 2 |
| | | | | | | | | | | CRYSTAL STRUCTURE, COMPLEX |
| | | | | | | | | | | (ZINC FINGER/DNA) |
| 374 | 1mey | C | 227 | 304 | 8.5e−41 | 0.40 | 0.84 | | DNA; CHAIN: A, B, D, E; | COMPLEX (ZINC FINGER/DNA) ZINC |
| | | | | | | | | | CONSENSUS ZINC FINGER | FINGER, PROTEIN-DNA |
| | | | | | | | | | PROTEIN; CHAIN: C, F, G; | INTERACTION, PROTEIN DESIGN, 2 |
| | | | | | | | | | | CRYSTAL STRUCTURE, COMPLEX |
| | | | | | | | | | | (ZINC FINGER/DNA) |
| 374 | 1mey | C | 255 | 360 | 1e−43 | −0.15 | 0.35 | | DNA; CHAIN: A, B, D, E; | COMPLEX (ZINC FINGER/DNA) ZINC |
| | | | | | | | | | CONSENSUS ZINC FINGER | FINGER, PROTEIN-DNA |
| | | | | | | | | | PROTEIN: CHAIN: C, F, G; | INTERACTION, PROTEIN DESIGN, 2 |
| | | | | | | | | | | CRYSTAL STRUCTURE, COMPLEX |
| | | | | | | | | | | (ZINC FINGER/DNA) |
| 374 | 1mey | C | 307 | 388 | 1e−48 | 0.06 | 1.00 | | DNA; CHAIN: A, B, D, E; | COMPLEX (ZINC FINGER/DNA) ZINC |
| | | | | | | | | | CONSENSUS ZINC FINGER | FINGER, PROTEIN-DNA |
| | | | | | | | | | PROTEIN: CHAIN: C, F, G; | INTERACTION, PROTEIN DESIGN, 2 |
| | | | | | | | | | | CRYSTAL STRUCTURE, COMPLEX |
| | | | | | | | | | | (ZINC FINGER/DNA) |
| 374 | 1mey | C | 335 | 416 | 5.1e−50 | −0.05 | 1.00 | | DNA; CHAIN: A, B, D, E; | COMPLEX (ZINC FINGER/DNA) ZINC |
| | | | | | | | | | CONSENSUS ZINC FINGER | FINGER, PROTEIN-DNA |
| | | | | | | | | | PROTEIN; CHAIN: C, F, G; | INTERACTION, PROTEIN DESIGN, 2 |
| | | | | | | | | | | CRYSTAL STRUCTURE, COMPLEX |
| | | | | | | | | | | (ZINC FINGER/DNA) |
| 374 | 1mey | C | 363 | 444 | 1e−50 | 0.39 | 1.00 | | DNA; CHAIN: A, B, D, E; | COMPLEX (ZINC FINGER/DNA) ZINC |
| | | | | | | | | | CONSENSUS ZINC FINGER | FINGER, PROTEIN-DNA |
| | | | | | | | | | PROTEIN; CHAIN: C, F, G; | INTERACTION, PROTEIN DESIGN, 2 |
| | | | | | | | | | | CRYSTAL STRUCTURE, COMPLEX |
| | | | | | | | | | | (ZINC FINGER/DNA) |
| 374 | 1mey | C | 391 | 472 | 1.7e−51 | 0.48 | 1.00 | | DNA; CHAIN: A, B, D, E; | COMPLEX (ZINC FINGER/DNA) ZINC |
| | | | | | | | | | CONSENSUS ZINC FINGER | FINGER, PROTEIN-DNA |
| | | | | | | | | | PROTEIN; CHAIN: C, F, G; | INTERACTION, PROTEIN DESIGN, 2 |
| | | | | | | | | | | CRYSTAL STRUCTURE, COMPLEX |
| | | | | | | | | | | (ZINC FINGER/DNA) |
| 374 | 1mey | C | 419 | 500 | 6.8e−51 | 0.55 | 1.00 | | DNA; CHAIN: A, B, D, E; | COMPLEX (ZINC FINGER/DNA) ZINC |
| | | | | | | | | | CONSENSUS ZINC FINGER | FINGER, PROTEIN-DNA |
| | | | | | | | | | PROTEIN; CHAIN: C, F, G; | INTERACTION, PROTEIN DESIGN, 2 |
| | | | | | | | | | | CRYSTAL STRUCTURE, COMPLEX |
| | | | | | | | | | | (ZINC FINGER/DNA) |
| 374 | 1mey | C | 447 | 528 | 1.2e−50 | 0.51 | 1.00 | | DNA; CHAIN: A, B, D, E; | COMPLEX (ZINC FINGER/DNA) ZINC |
| | | | | | | | | | CONSENSUS ZINC FINGER | FINGER, PROTEIN-DNA |
| | | | | | | | | | PROTEIN; CHAIN: C, F, G; | INTERACTION, PROTEIN DESIGN, 2 |
| | | | | | | | | | | CRYSTAL STRUCTURE, COMPLEX |
| | | | | | | | | | | (ZINC FINGER/DNA) |
| 374 | 1mey | C | 447 | 529 | 6.8e−51 | | | 106.37 | DNA; CHAIN: A, B, D, E; | COMPLEX (ZINC FINGER/DNA) ZINC |
| | | | | | | | | | CONSENSUS ZINC FINGER | FINGER, PROTEIN-DNA |
| | | | | | | | | | PROTEIN; CHAIN: C, F, G; | INTERACTION, PROTEIN DESIGN, 2 |
| | | | | | | | | | | CRYSTAL STRUCTURE, COMPLEX |
| | | | | | | | | | | (ZINC FINGER/DNA) |
| 374 | 1mey | C | 475 | 556 | 1.7e−50 | 0.37 | 1.00 | | DNA; CHAIN: A, B, D, E; | COMPLEX (ZINC FINGER/DNA) ZINC |
| | | | | | | | | | CONSENSUS ZINC FINGER | FINGER, PROTEIN-DNA |
| | | | | | | | | | PROTEIN; CHAIN: C, F, G; | INTERACTION, PROTEIN DESIGN, 2 |
| | | | | | | | | | | CRYSTAL STRUCTURE, COMPLEX |
| | | | | | | | | | | (ZINC FINGER/DNA) |
| 374 | 1mey | G | 225 | 252 | 1.5e−10 | −0.12 | 0.69 | | DNA; CHAIN: A, B, D, E; | COMPLEX (ZINC FINGER/DNA) ZINC |
| | | | | | | | | | CONSENSUS ZINC FINGER | FINGER, PROTEIN-DNA |
| | | | | | | | | | PROTEIN; CHAIN: C, F, G; | INTERACTION, PROTEIN DESIGN, 2 |
| | | | | | | | | | | CRYSTAL STRUCTURE, COMPLEX |
| | | | | | | | | | | (ZINC FINGER/DNA) |
| 374 | 1tf3 | A | 187 | 276 | 6.8e−14 | 0.06 | −0.06 | | TRANSCRIPTION FACTOR IIIA; | COMPLEX (TRANSCRIPTION |
| | | | | | | | | | CHAIN: A; 5S RNA GENE; CHAIN: | REGULATION/DNA) TFIIIA; 5S GENE; |
| | | | | | | | | | E, F; | NMR, TFIIIA, PROTEIN, DNA, |
| | | | | | | | | | | TRANSCRIPTION FACTOR, 5S RNA 2 |
| | | | | | | | | | | GENE, DNA BINDING PROTEIN, ZINC |
| | | | | | | | | | | FINGER, COMPLEX 3 |
| | | | | | | | | | | (TRANSCRIPTION |
| | | | | | | | | | | REGULATION/DNA) |
| 374 | 1tf6 | A | 187 | 341 | 5.1e−29 | 0.05 | −0.07 | | TFIIIA; CHAIN: A, D; 5S | COMPLEX (TRANSCRIPTION |
| | | | | | | | | | RIBOSOMAL RNA GENE; CHAIN; | REGULATION/DNA) COMPLEX |
| | | | | | | | | | B, C, E, F; | (TRANSCRIPTION |
| | | | | | | | | | | REGULATION/DNA), RNA |
| | | | | | | | | | | POLYMERASE III, 2 TRANSCRIPTION |
| | | | | | | | | | | INITIATION, ZINC FINGER PROTEIN |
| 374 | 1tf6 | A | 307 | 470 | 8.5e−39 | | | 117.85 | TFIIIA; CHAIN: A, D; 5S | COMPLEX (TRANSCRIPTION |
| | | | | | | | | | RIBOSOMAL RNA GENE; CHAIN: | REGULATION/DNA) COMPLEX |
| | | | | | | | | | B, C, E, F; | (TRANSCRIPTION |
| | | | | | | | | | | REGULATION/DNA), RNA |
| | | | | | | | | | | POLYMERASE III, 2 TRANSCRIPTION |
| | | | | | | | | | | INITIATION, ZINC FINGER PROTEIN |
| 374 | 1tf6 | A | 308 | 453 | 6.8e−38 | 0.01 | 0.98 | | TFIIIA; CHAIN: A, D; 5S | COMPLEX (TRANSCRIPTION |
| | | | | | | | | | RIBOSOMAL RNA GENE; CHAIN: | REGULATION/DNA) COMPLEX |
| | | | | | | | | | B, C, E, F; | (TRANSCRIPTION |
| | | | | | | | | | | REGULATION/DNA), RNA |
| | | | | | | | | | | POLYMERASE III, 2 TRANSCRIPTION |
| | | | | | | | | | | INITIATION, ZINC FINGER PROTEIN |
| 374 | 1tf6 | A | 336 | 481 | 1.7e−38 | 0.12 | 1.00 | | TFIIIA; CHAIN: A, D; 5S | COMPLEX (TRANSCRIPTION |
| | | | | | | | | | RIBOSOMAL RNA GENE; CHAIN: | REGULATION/DNA) COMPLEX |
| | | | | | | | | | B, C, E, F; | (TRANSCRIPTION |
| | | | | | | | | | | REGULATION/DNA), RNA |
| | | | | | | | | | | POLYMERASE III, 2 TRANSCRIPTION |
| | | | | | | | | | | INITIATION, ZINC FINGER PROTEIN |
| 374 | 1tf6 | A | 392 | 538 | 8.5e−39 | 0.13 | 0.96 | | TFIIIA; CHAIN: A, D; 5S | COMPLEX (TRANSCRIPTION |
| | | | | | | | | | RIBOSOMAL RNA GENE; CHAIN: | REGULATION/DNA) COMPLEX |
| | | | | | | | | | B, C, E, F; | (TRANSCRIPTION |
| | | | | | | | | | | REGULATION/DNA), RNA |
| | | | | | | | | | | POLYMERASE III, 2 TRANSCRIPTION |
| | | | | | | | | | | INITIATION, ZINC FINGER PROTEIN |
| 374 | 1tf6 | A | 448 | 556 | 3.4e−30 | 0.18 | 0.46 | | TFIIIA; CHAIN: A, D; 5S | COMPLEX (TRANSCRIPTION |
| | | | | | | | | | RIBOSOMAL RNA GENE: CHAIN: | REGULATION/DNA) COMPLEX |
| | | | | | | | | | B, C, E, F; | (TRANSCRIPTION |
| | | | | | | | | | | REGULATION/DNA), RNA |
| | | | | | | | | | | POLYMERASE III, 2 TRANSCRIPTION |
| | | | | | | | | | | INITIATION, ZINC FINGER PROTEIN |
| 374 | 1ubd | C | 166 | 280 | 8.5e−25 | 0.10 | 0.05 | | YY1; CHAIN: C; ADENO- | COMPLEX (TRANSCRIPTION |
| | | | | | | | | | ASSOCIATED VIRUS P5 | REGULATION/DNA) YING-YANG 1; |
| | | | | | | | | | INITIATOR ELEMENT DNA; | TRANSCRIPTION INITIATION, |
| | | | | | | | | | CHAIN: A, B; | INITIATOR ELEMENT, YY1, ZINC 2 |
| | | | | | | | | | | FINGER PROTEIN, DNA-PROTEIN |
| | | | | | | | | | | RECOGNITION, 3 COMPLEX |
| | | | | | | | | | | (TRANSCRIPTION |
| | | | | | | | | | | REGULATION/DNA) |
| 374 | 1ubd | C | 190 | 304 | 3.4e−27 | 0.28 | 0.60 | | YY1; CHAIN: C; ADENO- | COMPLEX (TRANSCRIPTION |
| | | | | | | | | | ASSOCIATED VIRUS P5 | REGULATION/DNA) YING-YANG 1; |
| | | | | | | | | | INITIATOR ELEMENT DNA; | TRANSCRIPTION INITIATION, |
| | | | | | | | | | CHAIN: A, B; | INITIATOR ELEMENT, YY1, ZINC 2 |
| | | | | | | | | | | FINGER PROTEIN, DNA-PROTEIN |
| | | | | | | | | | | RECOGNITION, 3 COMPLEX |
| | | | | | | | | | | (TRANSCRIPTION |
| | | | | | | | | | | REGULATION/DNA) |
| 374 | 1ubd | C | 263 | 360 | 8.5e−29 | −0.15 | 0.19 | | YY1; CHAIN: C; ADENO- | COMPLEX (TRANSCRIPTION |
| | | | | | | | | | ASSOCIATED VIRUS P5 | REGULATION/DNA) YING-YANG 1; |
| | | | | | | | | | INITIATOR ELEMENT DNA; | TRANSCRIPTION INITIATION, |
| | | | | | | | | | CHAIN: A, B; | INITIATOR ELEMENT, YY1, ZINC 2 |
| | | | | | | | | | | FINGER PROTEIN, DNA-PROTEIN |
| | | | | | | | | | | RECOGNITION, 3 COMPLEX |
| | | | | | | | | | | (TRANSCRIPTION |
| | | | | | | | | | | REGULATION/DNA) |
| 374 | 1ubd | C | 287 | 388 | 5.1e−34 | 0.12 | 0.94 | | YY1; CHAIN: C; ADENO- | COMPLEX (TRANSCRIPTION |
| | | | | | | | | | ASSOCIATED VIRUS P5 | REGULATION/DNA) YING-YANG 1; |
| | | | | | | | | | INITIATOR ELEMENT DNA; | TRANSCRIPTION INITIATION, |
| | | | | | | | | | CHAIN: A, B; | INITIATOR ELEMENT, YY1, ZINC 2 |
| | | | | | | | | | | FINGER PROTEIN, DNA-PROTEIN |
| | | | | | | | | | | RECOGNITION, 3 COMPLEX |
| | | | | | | | | | | (TRANSCRIPTION |
| | | | | | | | | | | REGULATION/DNA) |
| 374 | 1ubd | C | 312 | 444 | 9e−41 | 0.13 | 1.00 | | YY1; CHAIN: C; ADENO- | COMPLEX (TRANSCRIPTION |
| | | | | | | | | | ASSOCIATED VIRUS P5 | REGULATION/DNA) YING-YANG 1; |
| | | | | | | | | | INITIATOR ELEMENT DNA; | TRANSCRIPTION INITIATION, |
| | | | | | | | | | CHAIN: A, B; | INITIATOR ELEMENT, YY1, ZINC 2 |
| | | | | | | | | | | FINGER PROTEIN, DNA-PROTEIN |
| | | | | | | | | | | RECOGNITION, 3 COMPLEX |
| | | | | | | | | | | (TRANSCRIPTION |
| | | | | | | | | | | REGULATION/DNA) |
| 374 | 1ubd | C | 315 | 416 | 1.5e−34 | 0.01 | 0.99 | | YY1; CHAIN: C: ADENO- | COMPLEX (TRANSCRIPTION |
| | | | | | | | | | ASSOCIATED VIRUS P5 | REGULATION/DNA) YING-YANG 1; |
| | | | | | | | | | INITIATOR ELEMENT DNA; | TRANSCRIPTION INITIATION, |
| | | | | | | | | | CHAIN: A, B; | INITIATOR ELEMENT, YY1, ZINC 2 |
| | | | | | | | | | | FINGER PROTEIN, DNA-PROTEIN |
| | | | | | | | | | | RECOGNITION, 3 COMPLEX |
| | | | | | | | | | | (TRANSCRIPTION |
| | | | | | | | | | | REGULATION/DNA) |
| 374 | 1ubd | C | 343 | 444 | 1.5e−34 | 0.30 | 1.00 | | YY1; CHAIN: C; ADENO- | COMPLEX (TRANSCRIPTION |
| | | | | | | | | | ASSOCIATED VIRUS P5 | REGULATION/DNA) YING-YANG 1; |
| | | | | | | | | | INITIATOR ELEMENT DNA; | TRANSCRIPTION INITIATION, |
| | | | | | | | | | CHAIN: A, B; | INITIATOR ELEMENT, YY1, ZINC 2 |
| | | | | | | | | | | FINGER PROTEIN, DNA-PROTEIN |
| | | | | | | | | | | RECOGNITION, 3 COMPLEX |
| | | | | | | | | | | (TRANSCRIPTION |
| | | | | | | | | | | REGULATION/DNA) |
| 374 | 1ubd | C | 399 | 500 | 5.1e−36 | 0.23 | 1.00 | | YY1; CHAIN: C; ADENO- | COMPLEX (TRANSCRIPTION |
| | | | | | | | | | ASSOCIATED VIRUS P5 | REGULATION/DNA) YING-YANG 1; |
| | | | | | | | | | INITIATOR ELEMENT DNA; | TRANSCRIPTION INITIATION, |
| | | | | | | | | | CHAIN: A, B; | INITIATOR ELEMENT, YY1, ZINC 2 |
| | | | | | | | | | | FINGER PROTEIN, DNA-PROTEIN |
| | | | | | | | | | | RECOGNITION, 3 COMPLEX |
| | | | | | | | | | | (TRANSCRIPTION |
| | | | | | | | | | | REGULATION/DNA) |
| 374 | 1ubd | C | 418 | 529 | 1.5e−51 | 0.18 | 1.00 | | YY1; CHAIN: C; ADENO- | COMPLEX (TRANSCRIPTION |
| | | | | | | | | | ASSOCIATED VIRUS P5 | REGULATION/DNA) YING-YANG 1; |
| | | | | | | | | | INITIATOR ELEMENT DNA; | TRANSCRIPTION INITIATION, |
| | | | | | | | | | CHAIN: A, B; | INITIATOR ELEMENT, YY1, ZINC 2 |
| | | | | | | | | | | FINGER PROTEIN, DNA-PROTEIN |
| | | | | | | | | | | RECOGNITION, 3 COMPLEX |
| | | | | | | | | | | (TRANSCRIPTION |
| | | | | | | | | | | REGULATION/DNA) |
| 374 | 1ubd | C | 421 | 529 | 1.5e−51 | | | 98.87 | YY1; CHAIN: C; ADENO- | COMPLEX (TRANSCRIPTION |
| | | | | | | | | | ASSOCIATED VIRUS P5 | REGULATION/DNA) YING-YANG 1; |
| | | | | | | | | | INITIATOR ELEMENT DNA; | TRANSCRIPTION INITIATION, |
| | | | | | | | | | CHAIN: A, B; | INITIATOR ELEMENT, YY1, ZINC 2 |
| | | | | | | | | | | FINGER PROTEIN, DNA-PROTEIN |
| | | | | | | | | | | RECOGNITION, 3 COMPLEX |
| | | | | | | | | | | (TRANSCRIPTION |
| | | | | | | | | | | REGULATION/DNA) |
| 374 | 1ubd | C | 445 | 556 | 1.5e−46 | 0.20 | 0.98 | | YY1; CHAIN: C; ADENO- | COMPLEX (TRANSCRIPTION |
| | | | | | | | | | ASSOCIATED VIRUS P5 | REGULATION/DNA) YING-YANG 1; |
| | | | | | | | | | INITIATOR ELEMENT DNA; | TRANSCRIPTION INITIATION, |
| | | | | | | | | | CHAIN: A, B; | INITIATOR ELEMENT, YY1, ZINC 2 |
| | | | | | | | | | | FINGER PROTEIN, DNA-PROTEIN |
| | | | | | | | | | | RECOGNITION, 3 COMPLEX |
| | | | | | | | | | | (TRANSCRIPTION |
| | | | | | | | | | | REGULATION/DNA) |
| 374 | 1ubd | C | 455 | 556 | 1.5e−34 | 0.21 | 1.00 | | YY1; CHAIN: C; ADENO- | COMPLEX (TRANSCRIPTION |
| | | | | | | | | | ASSOCIATED VIRUS P5 | REGULATION/DNA) YING-YANG 1; |
| | | | | | | | | | INITIATOR ELEMENT DNA; | TRANSCRIPTION INITIATION, |
| | | | | | | | | | CHAIN: A, B; | INITIATOR ELEMENT, YY1, ZINC 2 |
| | | | | | | | | | | FINGER PROTEIN, DNA-PROTEIN |
| | | | | | | | | | | RECOGNITION, 3 COMPLEX |
| | | | | | | | | | | (TRANSCRIPTION |
| | | | | | | | | | | REGULATION/DNA) |
| 374 | 1zfd | | 532 | 558 | 6.8e−05 | 0.06 | 0.30 | | SWI5; CHAIN: NULL; | ZINC FINGER DNA BINDING DOMAIN |
| | | | | | | | | | | DNA BINDING MOTIF, ZINC FINGER |
| | | | | | | | | | | DNA BINDING DOMAIN |
| 374 | 2adr | | 189 | 254 | 3.4e−11 | −0.04 | 0.06 | | ADR1; CHAIN: NULL; | TRANSCRIPTION REGULATION |
| | | | | | | | | | | TRANSCRIPTION REGULATION, |
| | | | | | | | | | | ADRI, ZINC FINGER, NMR |
| 374 | 2gli | A | 161 | 303 | 8.5e−24 | 0.07 | −0.11 | | ZINC FINGER PROTEIN GLII; | COMPLEX (DNA-BINDING |
| | | | | | | | | | CHAIN: A; DNA: CHAIN: C, D; | PROTEIN/DNA) FIVE-FINGER GLI; |
| | | | | | | | | | | GLI, ZINC FINGER, COMPLEX (DNA- |
| | | | | | | | | | | BINDING PROTEIN/DNA) |
| 374 | 2gli | A | 287 | 415 | 1.2e−34 | 0.18 | 0.87 | | ZINC FINGER PROTEIN GLII; | COMPLEX (DNA-BINDING |
| | | | | | | | | | CHAIN: A; DNA; CHAIN: C, D; | PROTEIN/DNA) FIVE-FINGER GLI; |
| | | | | | | | | | | GLI, ZINC FINGER, COMPLEX (DNA- |
| | | | | | | | | | | BINDING PROTEIN/DNA) |
| 374 | 2gli | A | 335 | 474 | 1.2e−61 | | | 106.08 | ZINC FINGER PROTEIN GLI1; | COMPLEX (DNA-BINDING |
| | | | | | | | | | CHAIN: A; DNA; CHAIN: C, D; | PROTEIN/DNA) FIVE-FINGER GLI; |
| | | | | | | | | | | GLI, ZINC FINGER, COMPLEX (DNA- |
| | | | | | | | | | | BINDING PROTEIN/DNA) |
| 374 | 2gli | A | 393 | 530 | 1.2e−61 | 0.49 | 1.00 | | ZINC FINGER PROTEIN GLI1; | COMPLEX (DNA-BINDING |
| | | | | | | | | | CHAIN: A; DNA; CHAIN: C, D; | PROTEIN/DNA) FIVE-FINGER GLI; |
| | | | | | | | | | | GLI, ZINC FINGER, COMPLEX (DNA- |
| | | | | | | | | | | BINDING PROTEIN/DNA) |
| 374 | 2gli | A | 420 | 557 | 4.5e−58 | 0.36 | 1.00 | | ZINC FINGER PROTEIN GLI1; | COMPLEX (DNA-BINDING |
| | | | | | | | | | CHAIN: A; DNA; CHAIN: C. D; | PROTEIN/DNA) FIVE-FINGER GLI; |
| | | | | | | | | | | GLI, ZINC FINGER, COMPLEX (DNA- |
| | | | | | | | | | | BINDING PROTEIN/DNA) |
| 375 | 1c3t | A | 1 | 76 | 1e−31 | 0.68 | 1.00 | | ID8 UBIQUITIN; CHAIN: A; | DE NOVO PROTEIN PROTEIN |
| | | | | | | | | | | DESIGN, HYDROPHOBIC CORE, |
| | | | | | | | | | | PACKING, ROTAMERS, ROC, 2 |
| | | | | | | | | | | UBIQUITIN, DE NOVO PROTEIN, |
| | | | | | | | | | | UBIQUITIN |
| 375 | 1c3t | A | 1 | 76 | 1e−31 | | | 102.61 | ID8 UBIQUITIN; CHAIN: A; | DE NOVO PROTEIN PROTEIN |
| | | | | | | | | | | DESIGN, HYDROPHOBIC CORE, |
| | | | | | | | | | | PACKING, ROTAMERS, ROC, 2 |
| | | | | | | | | | | UBIQUITIN, DE NOVO PROTEIN, |
| | | | | | | | | | | UBIQUITIN |
| 375 | 1tbe | B | 1 | 72 | 1.2e−32 | 0.97 | 1.00 | | UBIQUITIN TETRAUBIQUITIN | |
| | | | | | | | | | 1TBE 3 | |
| 375 | 1tbe | B | 1 | 72 | 1.2e−32 | | | 97.63 | UBIQUITIN TETRAUBIQUITIN | |
| | | | | | | | | | 1TBE 3 | |
| 375 | 1ubi | | 1 | 76 | 1e−33 | 1.07 | 1.00 | | CHROMOSOMAL PROTEIN | |
| | | | | | | | | | UBIQUITIN 1UBI 3 | |
| 375 | 1ubi | | 1 | 76 | 7.5e−36 | | | 105.89 | CHROMOSOMAL PROTEIN | |
| | | | | | | | | | UBIQUITIN 1UBI 3 | |
| 375 | 1ubi | | 1 | 76 | 7.5e−36 | 1.07 | 1.00 | | CHROMOSOMAL PROTEIN | |
| | | | | | | | | | UBIQUITIN 1UBI 3 | |
| 375 | 1ud7 | A | 1 | 76 | 1.2e−32 | 0.96 | 1.00 | | UBIQUITIN CORE MUTANT ID7: | UBIQUITIN UBIQUITIN, DESIGNED |
| | | | | | | | | | CHAIN: A; | CORE MUTANT |
| 375 | 1ud7 | A | 1 | 76 | 1.2e−32 | | | 102.60 | UBIQUITIN CORE MUTANT ID7: | UBIQUITIN UBIQUITIN, DESIGNED |
| | | | | | | | | | CHAIN: A; | CORE MUTANT |
| 377 | 1cdm | A | 5 | 144 | 1.2e−62 | 0.90 | 1.00 | | CALCIUM-BINDING PROTEIN | |
| | | | | | | | | | CALMODULIN COMPLEXED | |
| | | | | | | | | | WITH CALMODULIN-BINDING | |
| | | | | | | | | | DOMAIN OF 1CDM 3 | |
| | | | | | | | | | CALMODULIN-DEPENDENT | |
| | | | | | | | | | PROTEIN KINASE II 1CDM 4 | |
| 377 | 1cdm | A | 5 | 144 | 1.2e−62 | | | 149.72 | CALCIUM-BINDING PROTEIN | |
| | | | | | | | | | CALMODULIN COMPLEXED | |
| | | | | | | | | | WITH CALMODULIN-BINDING | |
| | | | | | | | | | DOMAIN OF ICDM 3 | |
| | | | | | | | | | CALMODULIN-DEPENDENT | |
| | | | | | | | | | PROTEIN KINASE II 1CDM 4 | |
| 377 | 1cll | | 5 | 144 | 3.4e−66 | 1.07 | 1.00 | | CALCIUM-BINDING PROTEIN | |
| | | | | | | | | | CALMODULIN (VERTEBRATE) | |
| | | | | | | | | | 1CLL 3 | |
| 377 | 1cll | | 5 | 145 | 3.4e−66 | | | 156.05 | CALCIUM-BINDING PROTEIN | |
| | | | | | | | | | CALMODULIN (VERTEBRATE) | |
| | | | | | | | | | 1CLL 3 | |
| 377 | 1cmf | | 74 | 146 | 1.5e−23 | | | 79.20 | CALMODULIN (VERTEBRATE); | CALCIUM-BINDING PROTEIN |
| | | | | | | | | | 1CMF 6 CHAIN: NULL; 1CMF 7 | CALMODULIN APO TR2C-DOMAIN; |
| | | | | | | | | | | 1CMF 9 |
| 377 | 1cmf | | 81 | 143 | 1.5e−23 | 0.90 | 1.00 | | CALMODULIN (VERTEBRATE); | CALCIUM-BINDING PROTEIN |
| | | | | | | | | | 1CMF 6 CHAIN: NULL; 1CMF 7 | CALMODULIN APO TR2C-DOMAIN; |
| | | | | | | | | | | 1CMF 9 |
| 377 | 1exr | A | 3 | 143 | 5.1e−64 | 0.96 | 1.00 | | CALMODULIN; CHAIN: A; | METAL TRANSPORT CALMODULIN, |
| | | | | | | | | | | HIGH RESOLUTION, DISORDER |
| 377 | 1t71 | A | 81 | 143 | 1.5e−23 | 1.14 | 1.00 | | CALMODULIN; CHAIN: A; | TRANSPORT PROTEIN CALCIUM |
| | | | | | | | | | | BINDING, EF HAND, FOUR-HELIX |
| | | | | | | | | | | BUNDLE |
| 377 | 1tnx | | 1 | 143 | 3.4e−50 | | | 127.27 | TROPONIN C; 1TNX 4 CHAIN: | CALCIUM-BINDING PROTEIN EF- |
| | | | | | | | | | NULL; 1TNX 5 | HAND 1TNX 14 |
| 377 | 1tnx | | 5 | 143 | 3.4e−50 | 0.85 | 1.00 | | TROPONIN C; 1TNX 4 CHAIN: | CALCIUM-BINDING PROTEIN EF- |
| | | | | | | | | | NULL; 1TNX 5 | HAND 1TNX 14 |
| 377 | 1vrk | A | 2 | 146 | 1.5e−66 | 1.08 | 1.00 | | CALMODULIN; CHAIN: A; RS20; | CALMODULIN, CALCIUM BINDING, |
| | | | | | | | | | CHAIN: B; | HELIX-LOOP-HELIX, SIGNALLING, 2 |
| | | | | | | | | | | COMPLEX(CALCIUM-BINDING |
| | | | | | | | | | | PROTEIN/PEPTIDE) |
| 377 | 1vrk | A | 2 | 146 | 1.5e−66 | | | 156.22 | CALMODULIN; CHAIN: A; RS20; | CALMODULIN, CALCIUM BINDING, |
| | | | | | | | | | CHAIN: B; | HELIX-LOOP-HELIX, SIGNALLING, 2 |
| | | | | | | | | | | COMPLEX(CALCIUM-BINDING |
| | | | | | | | | | | PROTEIN/PEPTIDE) |
| 384 | 1b7f | A | 2 | 113 | 1.7e−21 | 0.43 | 0.99 | | SXL-LETHAL PROTEIN; CHAIN: A, | RNA-BINDING PROTEIN/RNA TRA |
| | | | | | | | | | B; RNA (5′- | PRE-MRNA; SPLICING REGULATION, |
| | | | | | | | | | R(P*GP*UP*UP*GP*UP*UP*UP*UP | RNP DOMAIN, RNA COMPLEX |
| | | | | | | | | | *UP*UP*UP*U)-CHAIN: P, Q: | |
| 384 | 1b7f | A | 33 | 205 | 3.4e−43 | 1.07 | 1.00 | | SXL-LETHAL PROTEIN; CHAIN: A, | RNA-BINDING PROTEIN/RNA TRA |
| | | | | | | | | | B; RNA (5′- | PRE-MRNA; SPLICING REGULATION, |
| | | | | | | | | | R(P*GP*UP*UP*GP*UP*UP*UP*UP | RNP DOMAIN, RNA COMPLEX |
| | | | | | | | | | *UP*UP*UP*U)-CHAIN: P, Q; | |
| 384 | 1b7f | A | 33 | 205 | 3.4e−43 | | | 84.87 | SXL-LETHAL PROTEIN; CHAIN: A, | RNA-BINDING PROTEIN/RNA TRA |
| | | | | | | | | | B; RNA (5′- | PRE-MRNA; SPLICING REGULATION, |
| | | | | | | | | | R(P*GP*UP*UP*GP*UP*UP*UP*UP | RNP DOMAIN, RNA COMPLEX |
| | | | | | | | | | *UP*UP*UP*U)-CHAIN: P, Q; | |
| 384 | 1cvj | A | 2 | 119 | 1.5e−31 | 0.42 | 1.00 | | POLYDENYLATE BINDING | GENE REGULATION/RNA POLY(A) |
| | | | | | | | | | PROTEIN 1; CHAIN: A, B, C, D, E, | BINDING PROTEIN 1, PABP 1; RRM, |
| | | | | | | | | | F, G, H; RNA (5′- | PROTEIN-RNA COMPLEX, GENE |
| | | | | | | | | | R(*AP*AP*AP*AP*AP*AP*AP*AP* | REGULATION/RNA |
| | | | | | | | | | AP*AP*A)-3′); CHAIN: M, N, O, P, | |
| | | | | | | | | | Q, R, S, T; | |
| 384 | 1cvj | A | 37 | 211 | 1.4e−43 | 0.72 | 1.00 | | POLYDENYLATE BINDING | GENE REGULATION/RNA POLY(A) |
| | | | | | | | | | PROTEIN 1; CHAIN: A, B, C, D, E, | BINDING PROTEIN 1, PABP 1; RRM, |
| | | | | | | | | | F, G, H; RNA (5′- | PROTEIN-RNA COMPLEX, GENE |
| | | | | | | | | | R(*AP*AP*AP*AP*AP*AP*AP*AP* | REGULATION/RNA |
| | | | | | | | | | AP*AP*A)-3′); CHAIN: M, N, O, P, | |
| | | | | | | | | | Q, R, S, T; | |
| 384 | 1cvj | A | 378 | 500 | 3.4e−23 | 0.16 | 1.00 | | POLYDENYLATE BINDING | GENE REGULATION/RNA POLY(A) |
| | | | | | | | | | PROTEIN 1; CHAIN: A, B, C, D, E, | BINDING PROTEIN 1, PABP 1; RRM, |
| | | | | | | | | | F, G, H: RNA(5′- | PROTEIN-RNA COMPLEX, GENE |
| | | | | | | | | | R(*AP*AP*AP*AP*AP*AP*AP*AP* | REGULATION/RNA |
| | | | | | | | | | AP*AP*A)-3′); CHAIN: M, N, O, P, | |
| | | | | | | | | | Q, R, S, T; | |
| 384 | 1cvj | B | 2 | 99 | 6.8e−26 | 0.31 | 1.00 | | POLYDENYLATE BINDING | GENE REGULATION/RNA POLY(A) |
| | | | | | | | | | PROTEIN 1; CHAIN: A, B, C, D, E, | BINDING PROTEIN 1, PABP 1; RRM, |
| | | | | | | | | | F, G, H; RNA (5′- | PROTEIN-RNA COMPLEX, GENE |
| | | | | | | | | | R(*AP*AP*AP*AP*AP*AP*AP*AP* | REGULATION/RNA |
| | | | | | | | | | AP*AP*A)-3′); CHAIN: M, N, O, P, | |
| | | | | | | | | | Q, R, S, T; | |
| 384 | 1cvj | B | 37 | 188 | 1.7e−37 | 0.57 | 1.00 | | POLYDENYLATE BINDING | GENE REGULATION/RNA POLY(A) |
| | | | | | | | | | PROTEIN 1; CHAIN: A, B, C, D, E, | BINDING PROTEIN 1, PABP 1; RRM, |
| | | | | | | | | | F, G, H; RNA (5′- | PROTEIN-RNA COMPLEX, GENE |
| | | | | | | | | | R(*AP*AP*AP*AP*AP*AP*AP*AP* | REGULATION/RNA |
| | | | | | | | | | AP*AP*A)-3′); CHAIN: M, N, O, P, | |
| | | | | | | | | | Q, R, S, T; | |
| 384 | 1cvj | F | 37 | 178 | 8.5e−28 | 0.33 | 1.00 | | POLYDENYLATE BINDING | GENE REGULATION/RNA POLY(A) |
| | | | | | | | | | PROTEIN 1; CHAIN: A, B, C, D, E, | BINDING PROTEIN 1, PABP 1; RRM, |
| | | | | | | | | | F, G, H; RNA (5′- | PROTEIN-RNA COMPLEX, GENE |
| | | | | | | | | | R(*AP*AP*AP*AP*AP*AP*AP*AP* | REGULATION/RNA |
| | | | | | | | | | AP*AP*A)-3′); CHAIN: M, N, O, P, | |
| | | | | | | | | | Q, R, S, T; | |
| 384 | 1cvj | H | 37 | 181 | 1.4e−28 | 0.46 | 1.00 | | POLYDENYLATE BINDING | GENE REGULATION/RNA POLY(A) |
| | | | | | | | | | PROTEIN 1; CHAIN: A, B, C, D, E, | BINDING PROTEIN 1, PABP 1; RRM, |
| | | | | | | | | | F, G, H; RNA (5′- | PROTEIN-RNA COMPLEX, GENE |
| | | | | | | | | | R(*AP*AP*AP*AP*AP*AP*AP*AP* | REGULATION/RNA |
| | | | | | | | | | AP*AP*A)-3′); CHAIN: M, N, O, P, | |
| | | | | | | | | | Q, R, S, T; | |
| 384 | 1d8z | A | 32 | 117 | 5.1e−22 | 0.61 | 1.00 | | HU ANTIGEN C; CHAIN: A; | RNA BINDING PROTEIN RNA- |
| | | | | | | | | | | BINDING DOMAIN |
| 384 | 1d8z | A | 419 | 501 | 4.5e−24 | 0.83 | 1.00 | | HU ANTIGEN C; CHAIN: A; | RNA BINDING PROTEIN RNA- |
| | | | | | | | | | | BINDING DOMAIN |
| 384 | 1d9a | A | 36 | 120 | 1.5e−17 | 0.77 | 1.00 | | HU ANTIGEN C; CHAIN: A; | RNA BINDING PROTEIN RNA- |
| | | | | | | | | | | BINDING DOMAIN |
| 384 | 1d9a | A | 418 | 501 | 4.5e−23 | 0.72 | 1.00 | | HU ANTIGEN C; CHAIN: A; | RNA BINDING PROTEIN RNA- |
| | | | | | | | | | | BINDING DOMAIN |
| 384 | 1hal | | 30 | 205 | 1.7e−51 | 0.70 | 1.00 | | HNRNP A1; CHAIN: NULL; | NUCLEAR PROTEIN |
| | | | | | | | | | | HETEROGENEOUS NUCLEAR |
| | | | | | | | | | | RIBONUCLEOPROTEIN A1, NUCLEAR |
| | | | | | | | | | | PROTEIN, HNRNP, RBD, RRM, RNP, |
| | | | | | | | | | | RNA BINDING, 2 |
| | | | | | | | | | | RIBONUCLEOPROTEIN |
| 384 | 1hal | | 31 | 204 | 1.7e−51 | | | 74.92 | HNRNP A1; CHAIN: NULL; | NUCLEAR PROTEIN |
| | | | | | | | | | | HETEROGENEOUS NUCLEAR |
| | | | | | | | | | | RIBONUCLEOPROTEIN A1, NUCLEAR |
| | | | | | | | | | | PROTEIN, HNRNP, RBD, RRM, RNP, |
| | | | | | | | | | | RNA BINDING, 2 |
| | | | | | | | | | | RIBONUCLEOPROTEIN |
| 384 | 1hal | | 376 | 494 | 1e−23 | 0.63 | −0.05 | | HNRNP A1; CHAIN: NULL; | NUCLEAR PROTEIN |
| | | | | | | | | | | HETEROGENEOUS NUCLEAR |
| | | | | | | | | | | RIBONUCLEOPROTEIN A1, NUCLEAR |
| | | | | | | | | | | PROTEIN, HNRNP, RBD, RRM, RNP, |
| | | | | | | | | | | RNA BINDING, 2 |
| | | | | | | | | | | RIBONUCLEOPROTEIN |
| 384 | 1hal | | 4 | 113 | 6.8e−22 | 0.33 | 0.63 | | HNRNP A1; CHAIN: NULL; | NUCLEAR PROTEIN |
| | | | | | | | | | | HETEROGENEOUS NUCLEAR |
| | | | | | | | | | | RIBONUCLEOPROTEIN A1, NUCLEAR |
| | | | | | | | | | | PROTEIN, HNRNP, RBD, RRM, RNP, |
| | | | | | | | | | | RNA BINDING, 2 |
| | | | | | | | | | | RIBONUCLEOPROTEIN |
| 384 | 1hal | | 413 | 498 | 3.4e−28 | 0.70 | 1.00 | | HNRNP A1; CHAIN: NULL; | NUCLEAR PROTEIN |
| | | | | | | | | | | HETEROGENEOUS NUCLEAR |
| | | | | | | | | | | RIBONUCLEOPROTEIN A1, NUCLEAR |
| | | | | | | | | | | PROTEIN, HNRNP, RBD, RRM, RNP, |
| | | | | | | | | | | RNA BINDING, 2 |
| | | | | | | | | | | RIBONUCLEOPROTEIN |
| 384 | 1hdl | A | 36 | 113 | 1e−22 | 0.91 | 1.00 | | HETEROGENEOUS NUCLEAR | RNA BINDING PROTEIN RNA- |
| | | | | | | | | | RIBONUCLEOPROTEIN D0; | BINDING DOMAIN |
| | | | | | | | | | CHAIN: A; | |
| 384 | 1hdl | A | 419 | 494 | 8.5e−24 | 1.02 | 0.99 | | HETEROGENEOUS NUCLEAR | RNA BINDING PROTEIN RNA- |
| | | | | | | | | | RIBONUCLEOPROTEIN D0; | BINDING DOMAIN |
| | | | | | | | | | CHAIN: A; | |
| 384 | 1sxl | | 406 | 501 | 6e−25 | 0.48 | 0.99 | | RNA-BINDING PROTEIN SEX- | |
| | | | | | | | | | LETHAL PROTEIN (C-TERMINUS, | |
| | | | | | | | | | OR SECOND RNA-BINDING | |
| | | | | | | | | | DOMAIN 1SXL 3 (RBD-2), | |
| | | | | | | | | | RESIDUES 199-294 PLUS N- | |
| | | | | | | | | | TERMINAL MET) 1SXL 4 (NMR, 17 | |
| | | | | | | | | | STRUCTURES) ISXL 5 | |
| 384 | 2mss | A | 36 | 113 | 6.8e−18 | 0.50 | 0.58 | | MUSASHI1; CHAIN: A; | RNA BINDING PROTEIN RNA- |
| | | | | | | | | | | BINDING DOMAIN |
| 384 | 2sxl | | 33 | 118 | 3.4e−20 | 0.63 | 1.00 | | SEX-LETHAL PROTEIN; CHAIN: | RNA-BINDING DOMAIN RNA- |
| | | | | | | | | | NULL; | BINDING DOMAIN, ALTERNATIVE |
| | | | | | | | | | | SPLICING |
| 384 | 2upl | A | 29 | 210 | 1.4e−53 | 0.69 | 1.00 | | HETEROGENEOUS NUCLEAR | COMPLEX |
| | | | | | | | | | RIBONUCLEOPROTEIN A1; | (RIBONUCLEOPROTEIN/DNA) HNRNP |
| | | | | | | | | | CHAIN: A; 12-NUCLEOTIDE | AI, UPI; COMPLEX |
| | | | | | | | | | SINGLE-STRANDED TELOMETRIC | (RIBONUCLEOPROTEIN/DNA), |
| | | | | | | | | | DNA; CHAIN: B; | HETEROGENEOUS NUCLEAR 2 |
| | | | | | | | | | | RIBONUCLEOPROTEIN A1 |
| 384 | 2upl | A | 30 | 213 | 1.4e−53 | | | 77.86 | HETEROGENEOUS NUCLEAR | COMPLEX |
| | | | | | | | | | RIBONUCLEOPROTEIN A1; | (RIBONUCLEOPROTEIN/DNA) HNRNP |
| | | | | | | | | | CHAIN: A; 12-NUCLEOTIDE | AI, UPI; COMPLEX |
| | | | | | | | | | SINGLE-STRANDED TELOMETRIC | (RIBONUCLEOPROTEIN/DNA), |
| | | | | | | | | | DNA; CHAIN: B; | HETEROGENEOUS NUCLEAR 2 |
| | | | | | | | | | | RIBONUCLEOPROTEIN A1 |
| 384 | 2upl | A | 376 | 499 | 1e−24 | −0.07 | 0.06 | | HETEROGENEOUS NUCLEAR | COMPLEX |
| | | | | | | | | | RIBONUCLEOPROTEIN A1; | (RIBONUCLEOPROTEIN/DNA) HNRNP |
| | | | | | | | | | CHAIN: A; 12-NUCLEOTIDE | AI, UPI; COMPLEX |
| | | | | | | | | | SINGLE-STRANDED TELOMETRIC | (RIBONUCLEOPROTEIN/DNA), |
| | | | | | | | | | DNA; CHAIN: B; | HETEROGENEOUS NUCLEAR 2 |
| | | | | | | | | | | RIBONUCLEOPROTEIN A1 |
| 384 | 2upl | A | 4 | 119 | 5.1e−23 | 0.44 | 0.63 | | HETEROGENEOUS NUCLEAR | COMPLEX |
| | | | | | | | | | RIBONUCLEOPROTEIN A1; | (RIBONUCLEOPROTEIN/DNA) HNRNP |
| | | | | | | | | | CHAIN: A; 12-NUCLEOTIDE | AI, UPI; COMPLEX |
| | | | | | | | | | SINGLE-STRANDED TELOMETRIC | (RIBONUCLEOPROTEIN/DNA), |
| | | | | | | | | | DNA; CHAIN: B; | HETEROGENEOUS NUCLEAR 2 |
| | | | | | | | | | | RIBONUCLEOPROTEIN AI |
| 384 | 2up1 | A | 412 | 501 | 1.5e−29 | 0.87 | 1.00 | | HETEROGENEOUS NUCLEAR | COMPLEX |
| | | | | | | | | | RIBONUCLEOPROTEIN AI; | (RIBONUCLEOPROTEIN/DNA) HNRNP |
| | | | | | | | | | CHAIN: A; 12-NUCLEOTIDE | AI, UPI; COMPLEX |
| | | | | | | | | | SINGLE-STRANDED TELOMETRIC | (RIBONUCLEOPROTEIN/DNA), |
| | | | | | | | | | DNA; CHAIN: B; | HETEROGENEOUS NUCLEAR 2 |
| | | | | | | | | | | RIBONUCLEOPROTEIN AI |
| 384 | 3sx1 | A | 2 | 106 | 1.2e−20 | 0.47 | 0.99 | | SEX-LETHAL; CHAIN: A, B, C; | RNA BINDING DOMAIN RNA |
| | | | | | | | | | | BINDING DOMAIN, RBD, RNA |
| | | | | | | | | | | RECOGNITION MOTIF, RRM, 2 |
| | | | | | | | | | | SPLICING INHIBITOR, |
| | | | | | | | | | | TRANSLATIONAL INHIBITOR, SEX 3 |
| | | | | | | | | | | DETERMINATION, X CHROMOSOME |
| | | | | | | | | | | DOSAGE COMPENSATION |
| 384 | 3sx1 | A | 35 | 189 | 3.4e−41 | 0.72 | 1.00 | | SEX-LETHAL; CHAIN: A, B, C; | RNA BINDING DOMAIN RNA |
| | | | | | | | | | | BINDING DOMAIN, RBD, RNA |
| | | | | | | | | | | RECOGNITION MOTIF, RRM, 2 |
| | | | | | | | | | | SPLICING INHIBITOR, |
| | | | | | | | | | | TRANSLATIONAL INHIBITOR, SEX 3 |
| | | | | | | | | | | DETERMINATION, X CHROMOSOME |
| | | | | | | | | | | DOSAGE COMPENSATION |
| 391 | 1a06 | | 1 | 327 | 1.7e−63 | | | 98.83 | CALCIUM/CALMODULIN- | KINASE KINASE, SIGNAL |
| | | | | | | | | | DEPENDENT PROTEIN KINASE; | TRANSDUCTION, |
| | | | | | | | | | CHAIN: NULL; | CALCIUM/CALMODULIN |
| 391 | 1a6o | | 1 | 296 | 1.2e−81 | | | 153.21 | PROTEIN KINASE CK2/ALPHA- | TRANSFERASE TRANSFERASE, |
| | | | | | | | | | SUBUNIT; CHAIN: NULL; | SERINE/THREONINE-PROTEIN |
| | | | | | | | | | | KINASE, CASEIN KINASE, 2 SER/THR |
| | | | | | | | | | | KINASE |
| 391 | 1a6o | | 3 | 295 | 1.2e−81 | 0.30 | 1.00 | | PROTEIN KINASE CK2/ALPHA- | TRANSFERASE TRANSFERASE, |
| | | | | | | | | | SUBUNIT; CHAIN: NULL; | SERINE/THREONINE-PROTEIN |
| | | | | | | | | | | KINASE, CASEIN KINASE, 2 SER/THR |
| | | | | | | | | | | KINASE |
| 391 | 1apm | E | 1 | 324 | 6e−55 | | | 116.50 | TRANSFERASE(PHOSPHOTRANSFERASE) | |
| | | | | | | | | | $C-/AMP$-DEPENDENT | |
| | | | | | | | | | PROTEIN KINASE (E.C.2.7.1.37) | |
| | | | | | | | | | ($C/APK$) 1APM 3 (CATALYTIC | |
| | | | | | | | | | SUBUNIT) ALPHA ISOENZYME | |
| | | | | | | | | | MUTANT WITH SER 139 1APM 4 | |
| | | | | | | | | | REPLACED BY ALA (/S139A$) | |
| | | | | | | | | | COMPLEX WITH THE PEPTIDE | |
| | | | | | | | | | 1APM 5 INHIBITOR PKI(5-24) AND | |
| | | | | | | | | | THE DETERGENT MEGA-8 1APM 6 | |
| 391 | 1apm | E | 2 | 288 | 1e−53 | 0.45 | 1.00 | | TRANSFERASE(PHOSPHOTRANSFERASE) | |
| | | | | | | | | | $C-/AMP$-DEPENDENT | |
| | | | | | | | | | PROTEIN KINASE (E.C.2.7.1.37) | |
| | | | | | | | | | ($C/APK$) 1APM 3 (CATALYTIC | |
| | | | | | | | | | SUBUNIT) ALPHA ISOENZYME | |
| | | | | | | | | | MUTANT WITH SER 139 1APM 4 | |
| | | | | | | | | | REPLACED BY ALA (/S139A$) | |
| | | | | | | | | | COMPLEX WITH THE PEPTIDE | |
| | | | | | | | | | 1APM 5 INHIBITOR PKI(5-24) AND | |
| | | | | | | | | | THE DETERGENT MEGA-8 1APM 6 | |
| 391 | 1apm | E | 2 | 304 | 6e−55 | 0.31 | 1.00 | | TRANSFERASE(PHOSPHOTRANSFERASE) | |
| | | | | | | | | | $C-/AMP$-DEPENDENT | |
| | | | | | | | | | PROTElN KINASE (E.C.2.7.1.37) | |
| | | | | | | | | | ($C/APK$) 1APM 3 (CATALYTIC | |
| | | | | | | | | | SUBUNIT) ALPHA ISOENZYME | |
| | | | | | | | | | MUTANT WITH SER 139 1APM 4 | |
| | | | | | | | | | REPLACED BY ALA (/S139A$) | |
| | | | | | | | | | COMPLEX WITH THE PEPTIDE | |
| | | | | | | | | | 1APM 5 INHIBITOR PKI(5-24) AND | |
| | | | | | | | | | THE DETERGENT MEGA-8 1APM 6 | |
| 391 | 1aql | | 2 | 294 | 0 | 0.37 | 1.00 | | CYCLIN-DEPENDENT PROTEIN | PROTEIN KINASE CDK2; PROTEIN |
| | | | | | | | | | KINASE 2; CHAIN: NULL; | KINASE, CELL CYCLE, |
| | | | | | | | | | | PHOSPHORYLATION, |
| | | | | | | | | | | STAUROSPORINE, 2 CELL DIVISION, |
| | | | | | | | | | | MITOSIS, INHIBITION |
| 391 | 1aql | | 2 | 298 | 0 | | | 212.68 | CYCLIN-DEPENDENT PROTEIN | PROTEIN KINASE CDK2; PROTEIN |
| | | | | | | | | | KINASE 2; CHAIN: NULL; | KINASE, CELL CYCLE, |
| | | | | | | | | | | PHOSPHORYLATION, |
| | | | | | | | | | | STAUROSPORINE, 2 CELL DIVISION, |
| | | | | | | | | | | MITOSIS, INHIBITION |
| 391 | 1bi8 | A | 3 | 289 | 3.4e−91 | | | 182.71 | CYCLIN-DEPENDENT KINASE 6; | COMPLEX (KINASE/INHIBITOR) |
| | | | | | | | | | CHAIN: A, C; CYCLIN- | CDK6; P19INK4D; CYCLIN |
| | | | | | | | | | DEPENDENT KINASE INHIBITOR; | DEPENDENT KINASE, CYCLIN |
| | | | | | | | | | CHAIN: B, D; | DEPENDENT KINASE INHIBITORY 2 |
| | | | | | | | | | | PROTEIN, CDK, INK4, CELL CYCLE, |
| | | | | | | | | | | COMPLEX (KINASE/INHIBITOR) |
| | | | | | | | | | | HEADER HELIX |
| 391 | 1bi8 | A | 4 | 289 | 3.4e−91 | 0.04 | 1.00 | | CYCLIN-DEPENDENT KINASE 6; | COMPLEX (KINASE/INHIBITOR) |
| | | | | | | | | | CHAIN: A, C; CYCLIN- | CDK6; P19INK4D; CYCLIN |
| | | | | | | | | | DEPENDENT KINASE INHIBITOR; | DEPENDENT KINASE, CYCLIN |
| | | | | | | | | | CHAIN: B, D; | DEPENDENT KINASE INHIBITORY 2 |
| | | | | | | | | | | PROTEIN, CDK, INK4, CELL CYCLE, |
| | | | | | | | | | | COMPLEX (KINASE/INHIBITOR) |
| | | | | | | | | | | HEADER HELIX |
| 391 | 1blx | A | 1 | 296 | 1.7e−99 | | | 202.88 | CYCLIN-DEPENDENT KINASE 6; | COMPLEX (INHIBITOR |
| | | | | | | | | | CHAIN: A; P19INK4D; CHAIN: B; | PROTEIN/KINASE) INHIBITOR |
| | | | | | | | | | | PROTEIN, CYCLIN-DEPENDENT |
| | | | | | | | | | | KINASE, CELL CYCLE 2 CONTROL, |
| | | | | | | | | | | ALPHA/BETA, COMPLEX (INHIBITOR |
| | | | | | | | | | | PROTEIN/KINASE) |
| 391 | 1blx | A | 4 | 291 | 1.7e−99 | 0.27 | 1.00 | | CYCLIN-DEPENDENT KINASE 6; | COMPLEX (INHIBITOR |
| | | | | | | | | | CHAIN: A; P19INK4D; CHAIN: B; | PROTEIN/KINASE) INHIBITOR |
| | | | | | | | | | | PROTEIN, CYCLIN-DEPENDENT |
| | | | | | | | | | | KINASE, CELL CYCLE 2 CONTROL, |
| | | | | | | | | | | ALPHA/BETA, COMPLEX (INHIBITOR |
| | | | | | | | | | | PROTEIN/KINASE) |
| 391 | 1byg | A | 1 | 303 | 3e−34 | | | 74.19 | C-TERMINAL SRC KINASE; | TRANSFERASE CSK; PROTEIN |
| | | | | | | | | | CHAIN: A; | KINASE, C-TERMINAL SRC KINASE, |
| | | | | | | | | | | PHOSPHORYLATION, 2 |
| | | | | | | | | | | STAUROSPORINE, TRANSFERASE |
| 391 | 1cki | A | 2 | 281 | 3e−55 | | | 68.61 | CASEIN KINASE 1 DELTA; 1CKI 6 | PHOSPHOTRANSFERASE PROTEIN |
| | | | | | | | | | CHAIN: A, B; 1CKI 7 | KINASE 1CKI 18 |
| 391 | 1cki | A | 4 | 288 | 3e−55 | 0.17 | 0.89 | | CASEIN KINASE 1 DELTA; 1CKI 6 | PHOSPHOTRANSFERASE PROTEIN |
| | | | | | | | | | CHAIN: A, B; 1CKI 7 | KINASE 1CKI 18 |
| 391 | 1cm8 | A | 1 | 326 | 0 | 0.42 | 1.00 | | PHOSPHORYLATED MAP KINASE | TRANSFERASE STRESS-ACTIVATED |
| | | | | | | | | | P38-GAMMA; CHAIN: A, B; | PROTEIN KINASE-3, ERK6, ERK5: P38- |
| | | | | | | | | | | GAMMA, GAMMA, |
| | | | | | | | | | | PHOSPHORYLATION, MAP KINASE |
| 391 | 1cmk | E | 1 | 324 | 6.8e−56 | | | 111.92 | PHOSPHOTRANSFERASE CAMP- | |
| | | | | | | | | | DEPENDENT PROTEIN KINASE | |
| | | | | | | | | | CATALYTIC SUBUNIT 1CMK 3 | |
| | | | | | | | | | (E.C.2.7.1.37) 1CMK 4 | |
| 391 | 1cmk | E | 2 | 288 | 6.8e−56 | 0.46 | 1.00 | | PHOSPHOTRANSFERASE CAMP- | |
| | | | | | | | | | DEPENDENT PROTEIN KINASE | |
| | | | | | | | | | CATALYTIC SUBUNIT 1CMK 3 | |
| | | | | | | | | | (E.C.2.7.1.37) 1CMK 4 | |
| 391 | 1csn | | 1 | 284 | 5.1e−18 | | | 77.16 | CASEIN KINASE-1; 1CSN 4 | PHOSPHOTRANSFERASE |
| 391 | 1ctp | E | 1 | 311 | 1.5e−56 | | | 109.28 | TRANSFERASE(PHOSPHOTRANSFERASE) | |
| | | | | | | | | | CAMP-DEPENDENT | |
| | | | | | | | | | PROTEIN KINASE (E.C.2.7.1.37) | |
| | | | | | | | | | (CAPK) 1CTP 3 (CATALYTIC | |
| | | | | | | | | | SUBUNIT) 1CTP 4 | |
| 391 | 1f3m | C | 3 | 297 | 7.5e−67 | 0.41 | 1.00 | | SERINE/THREONINE-PROTEIN | TRANSFERASE KINASE DOMAIN, |
| | | | | | | | | | KINASE PAK-ALPHA; CHAIN: A, | AUTOINHIBITORY FRAGMENT, |
| | | | | | | | | | B; SERINE/THREONINE-PROTEIN | HOMODIMER |
| | | | | | | | | | KINASE PAK-ALPHA; CHAIN: C, | |
| | | | | | | | | | D; | |
| 391 | 1fgk | A | 1 | 299 | 1.5e−38 | | | 95.41 | FGF RECEPTOR I; CHAIN: A, B; | PHOSPHOTRANSFERASE FGFRIK, |
| | | | | | | | | | | FIBROBLAST GROWTH FACTOR |
| | | | | | | | | | | RECEPTOR 1; TRANSFERASE, |
| | | | | | | | | | | TYROSINE-PROTEIN KINASE, ATP- |
| | | | | | | | | | | BINDING, 2 PHOSPHORYLATION, |
| | | | | | | | | | | RECEPTOR, PHOSPHOTRANSFERASE |
| 391 | 1fgk | B | 1 | 298 | 7.5e−37 | | | 101.29 | FGF RECEPTOR 1; CHAIN: A, B; | PHOSPHOTRANSFERASE FGFRIK, |
| | | | | | | | | | | FIBROBLAST GROWTH FACTOR |
| | | | | | | | | | | RECEPTOR 1; TRANSFERASE, |
| | | | | | | | | | | TYROSINE-PROTEIN KINASE, ATP- |
| | | | | | | | | | | BINDING, 2 PHOSPHORYLATION, |
| | | | | | | | | | | RECEPTOR, PHOSPHOTRANSFERASE |
| 391 | 1hcl | | 2 | 294 | 0 | 0.67 | 1.00 | | HUMAN CYCLIN-DEPENDENT | PROTEIN KINASE CDK2; |
| | | | | | | | | | KINASE 2; CHAIN: NULL; | TRANSFERASE, SERINE/THREONINE |
| | | | | | | | | | | PROTEIN KINASE, ATP-BINDING, 2 |
| | | | | | | | | | | CELL CYCLE, CELL DIVISION, |
| | | | | | | | | | | MITOSIS, PHOSPHORYLATION |
| 391 | 1hcl | | 2 | 298 | 0 | | | 239.66 | HUMAN CYCLIN-DEPENDENT | PROTEIN KINASE CDK2; |
| | | | | | | | | | KINASE 2; CHAIN: NULL; | TRANSFERASE, SERINE/THREONINE |
| | | | | | | | | | | PROTEIN KINASE, ATP-BINDING, 2 |
| | | | | | | | | | | CELL CYCLE, CELL DIVISION, |
| | | | | | | | | | | MITOSIS, PHOSPHORYLATION |
| 391 | 1ian | | 1 | 328 | 0 | 0.12 | 1.00 | | P38 MAP KINASE; CHAIN: NULL; | SERINE/THREONINE-PROTEIN |
| | | | | | | | | | | KINASE CSBP, RK, P38; PROTEIN |
| | | | | | | | | | | SER/THR-KINASE, |
| | | | | | | | | | | SERINE/THREONINE-PROTEIN |
| | | | | | | | | | | KINASE |
| 391 | 1ian | | 1 | 328 | 0 | | | 163.36 | P38 MAP KINASE; CHAIN: NULL; | SERINE/THREONINE-PROTEIN |
| | | | | | | | | | | KINASE CSBP, RK, P38; PROTEIN |
| | | | | | | | | | | SER/THR-KINASE, |
| | | | | | | | | | | SERINE/THREONINE-PROTEIN |
| | | | | | | | | | | KINASE |
| 391 | 1ir3 | A | 1 | 275 | 4.5e−37 | | | 79.01 | INSULIN RECEPTOR; CHAIN: A; | COMPLEX |
| | | | | | | | | | PEPTIDE SUBSTRATE; CHAIN: B; | (TRANSFERASE/SUBSTRATE) |
| | | | | | | | | | | TYROSINE KINASE, SIGNAL |
| | | | | | | | | | | TRANSDUCTION, |
| | | | | | | | | | | PHOSPHOTRANSFERASE, 2 |
| | | | | | | | | | | COMPLEX (KINASE/PEPTIDE |
| | | | | | | | | | | SUBSTRATE/ATP ANALOG), |
| | | | | | | | | | | ENZYME, 3 COMPLEX |
| | | | | | | | | | | (TRANSFERASE/SUBSTRATE) |
| 391 | 1jnk | | 1 | 323 | 0 | 0.46 | 1.00 | | C-JUN N-TERMINAL KINASE; | TRANSFERASE JNK3; TRANSFERASE, |
| | | | | | | | | | CHAIN: NULL; | JNK3 MAP KINASE, |
| | | | | | | | | | | SERINE/THREONINE PROTEIN 2 |
| | | | | | | | | | | KINASE |
| 391 | 1jnk | | 1 | 331 | 0 | | | 161.78 | C-JUN N-TERMINAL KINASE; | TRANSFERASE JNK3; TRANSFERASE, |
| | | | | | | | | | CHAIN: NULL; | JNK3 MAP KINASE, |
| | | | | | | | | | | SERINE/THREONINE PROTEIN 2 |
| | | | | | | | | | | KINASE |
| 391 | 1koa | | 1 | 302 | 1e−57 | 0.26 | 1.00 | | TWITCHIN; CHAIN: NULL; | KINASE KINASE, TWITCHIN, |
| | | | | | | | | | | INTRASTERIC REGULATION |
| 391 | 1koa | | 1 | 358 | 1e−57 | | | 86.80 | TWITCHIN; CHAIN: NULL; | KINASE KINASE, TWITCHIN, |
| | | | | | | | | | | INTRASTERIC REGULATION |
| 391 | 1kob | A | 1 | 292 | 1.7e−57 | 0.26 | 1.00 | | TWITCHIN: CHAIN: A, B; | KINASE KINASE, TWITCHIN, |
| | | | | | | | | | | INTRASTERIC REGULATION |
| 391 | 1kob | A | 1 | 357 | 1.7e−57 | | | 124.22 | TWITCHIN; CHAIN: A, B; | KINASE KINASE, TWITCHIN, |
| | | | | | | | | | | INTRASTERIC REGULATION |
| 391 | 1p38 | | 1 | 328 | 0 | 0.47 | 1.00 | | MAP KINASE P38; CHAIN: NULL; | TRANSFERASE MITOGEN |
| | | | | | | | | | | ACTIVATED PROTEIN KINASE; |
| | | | | | | | | | | TRANSFERASE, MAP KINASE, |
| | | | | | | | | | | SERINE/THREONINE-PROTEIN |
| | | | | | | | | | | KINASE, 2 P38 |
| 391 | 1p38 | | 1 | 332 | 0 | | | 191.19 | MAP KINASE P38; CHAIN: NULL; | TRANSFERASE MITOGEN |
| | | | | | | | | | | ACTIVATED PROTEIN KINASE; |
| | | | | | | | | | | TRANSFERASE, MAP KINASE, |
| | | | | | | | | | | SERINE/THREONINE-PROTEIN |
| | | | | | | | | | | KINASE, 2 P38 |
| 391 | 1phk | | 1 | 291 | 1.7e−66 | | | 123.81 | PHOSPHORYLASE KINASE; | KINASE RABBIT MUSCLE |
| | | | | | | | | | CHAIN: NULL; | PHOSPHORYLASE KINASE; |
| | | | | | | | | | | GLYCOGEN METABOLISM, |
| | | | | | | | | | | TRANSFERASE, SERINE/THREONINE- |
| | | | | | | | | | | PROTEIN, 2 KINASE, ATP-BINDING, |
| | | | | | | | | | | CALMODULIN-BINDING |
| 391 | 1phk | | 3 | 291 | 1.7e−66 | 0.37 | 1.00 | | PHOSPHORYLASE KINASE; | KINASE RABBIT MUSCLE |
| | | | | | | | | | CHAIN: NULL; | PHOSPHORYLASE KINASE; |
| | | | | | | | | | | GLYCOGEN METABOLISM, |
| | | | | | | | | | | TRANSFERASE, SERINE/THREONINE- |
| | | | | | | | | | | PROTEIN, 2 KINASE, ATP-BINDING, |
| | | | | | | | | | | CALMODULIN-BINDING |
| 391 | 1pme | | 1 | 330 | 0 | 0.53 | 1.00 | | ERK2: CHAIN: NULL; | TRANSFERASE MAP KINASE, |
| | | | | | | | | | | SERINE/THREONINE PROTEIN |
| | | | | | | | | | | KINASE, TRANSFERASE |
| 391 | 1pme | | 1 | 331 | 0 | | | 183.19 | ERK2; CHAIN: NULL; | TRANSFERASE MAP KINASE, |
| | | | | | | | | | | SERINE/THREONINE PROTEIN |
| | | | | | | | | | | KINASE, TRANSFERASE |
| 391 | 1tki | A | 1 | 358 | 1.7e−45 | | | 114.84 | TITIN; CHAIN: A, B; | SERINE KINASE SERINE KINASE, |
| | | | | | | | | | | TITIN, MUSCLE, AUTOINHIBITION |
| 391 | 3erk | | 1 | 325 | 0 | | | 187.32 | EXTRACELLULAR REGULATED | TRANSFERASE MITOGEN |
| | | | | | | | | | KINASE 2; CHAIN: NULL; | ACTIVATED PROTEIN KINASE, MAP |
| | | | | | | | | | | 2, ERK2; TRANSFERASE, |
| | | | | | | | | | | SERINE/THREONINE-PROTEIN |
| | | | | | | | | | | KINASE, MAP KINASE, 2 ERK2 |
| 391 | 3erk | | 1 | 326 | 0 | 0.54 | 1.00 | | EXTRACELLULAR REGULATED | TRANSFERASE MITOGEN |
| | | | | | | | | | KINASE 2; CHAIN: NULL; | ACTIVATED PROTEIN KINASE, MAP |
| | | | | | | | | | | 2, ERK2; TRANSFERASE, |
| | | | | | | | | | | SERINE/THREONINE-PROTEIN |
| | | | | | | | | | | KINASE, MAP KINASE, 2 ERK2 |
| 393 | 1apq | | 120 | 154 | 1.5e−11 | −0.02 | 1.00 | | COMPLEMENT PROTEASE CIR: | COMPLEMENT COMPLEMENT, EGF, |
| | | | | | | | | | CHAIN: NULL; | CALCIUM BINDING, SERINE |
| | | | | | | | | | | PROTEASE |
| 393 | 1ek4 | A | 5 | 111 | 6e−25 | 0.51 | 1.00 | | INTEGRIN ALPHA-1; CHAIN: A, B; | STRUCTURAL PROTEIN I-DOMAIN, |
| | | | | | | | | | | METAL BINDING, COLLAGEN, |
| | | | | | | | | | | ADHESION |
| 393 | 1ek4 | A | 527 | 709 | 1e−46 | 1.12 | 1.00 | | INTEGRIN ALPHA-1; CHAIN: A, B; | STRUCTURAL PROTEIN I-DOMAIN, |
| | | | | | | | | | | METAL BINDING, COLLAGEN, |
| | | | | | | | | | | ADHESION |
| 393 | 1dan | L | 116 | 205 | 4.5e−20 | −0.44 | 0.65 | | BLOOD COAGULATION FACTOR | BLOOD COAGULATION, SERINE |
| | | | | | | | | | VIIA; CHAIN: L, H; SOLUBLE | PROTEASE, COMPLEX, CO-FACTOR, |
| | | | | | | | | | TISSUE FACTOR; CHAIN: T, U; D- | 2 RECEPTOR ENZYME, INHIBITOR, |
| | | | | | | | | | PHE-PHE-ARG- | GLA, EGF, 3 COMPLEX (SERINE |
| | | | | | | | | | CHLOROMETHYLKETONE | PROTEASE/COFACTOR/LIGAND) |
| | | | | | | | | | (DFFRCMK) WITH CHAIN: C; | |
| 393 | 1dan | L | 124 | 246 | 3e−32 | −0.30 | 0.10 | | BLOOD COAGULATION FACTOR | BLOOD COAGULATION, SERINE |
| | | | | | | | | | VIIA; CHAIN: L, H; SOLUBLE | PROTEASE, COMPLEX, CO-FACTOR, |
| | | | | | | | | | TISSUE FACTOR; CHAIN: T, U; D- | 2 RECEPTOR ENZYME, INHIBITOR, |
| | | | | | | | | | PHE-PHE-ARG- | GLA, EGF, 3 COMPLEX (SERINE |
| | | | | | | | | | CHLOROMETHYLKETONE | PROTEASE/COFACTOR/LIGAND) |
| | | | | | | | | | (DFFRCMK) WITH CHAIN: C; | |
| 393 | 1dan | L | 168 | 287 | 4.5e−31 | −0.15 | 0.55 | | BLOOD COAGULATION FACTOR | BLOOD COAGULATION, SERINE |
| | | | | | | | | | VIIA; CHAIN: L, H; SOLUBLE | PROTEASE, COMPLEX, CO-FACTOR, |
| | | | | | | | | | TISSUE FACTOR; CHAIN: T, U; D- | 2 RECEPTOR ENZYME, INHIBITOR, |
| | | | | | | | | | PHE-PHE-ARG- | GLA, EGF, 3 COMPLEX (SERINE |
| | | | | | | | | | CHLOROMETHYLKETONE | PROTEASE/COFACTOR/LIGAND) |
| | | | | | | | | | (DFFRCMK) WITH CHAIN: C; | |
| 393 | 1dan | L | 207 | 328 | 6e−31 | −0.25 | 0.57 | | BLOOD COAGULATION FACTOR | BLOOD COAGULATION, SERINE |
| | | | | | | | | | VIIA; CHAIN: L, H; SOLUBLE | PROTEASE, COMPLEX, CO-FACTOR, |
| | | | | | | | | | TISSUE FACTOR; CHAIN: T, U; D- | 2 RECEPTOR ENZYME, INHIBITOR, |
| | | | | | | | | | PHE-PHE-ARG- | GLA, EGF, 3 COMPLEX (SERINE |
| | | | | | | | | | CHLOROMETHYLKETONE | PROTEASE/COFACTOR/LIGAND) |
| | | | | | | | | | (DFFRCMK) WITH CHAIN: C; | |
| 393 | 1dan | L | 248 | 369 | 3e−25 | −0.40 | 0.11 | | BLOOD COAGULATION FACTOR | BLOOD COAGULATION, SERINE |
| | | | | | | | | | VIIA; CHAIN: L, H; SOLUBLE | PROTEASE, COMPLEX, CO-FACTOR, |
| | | | | | | | | | TISSUE FACTOR; CHAIN: T, U; D- | 2 RECEPTOR ENZYME, INHIBITOR, |
| | | | | | | | | | PHE-PHE-ARG- | GLA, EGF, 3 COMPLEX (SERINE |
| | | | | | | | | | CHLOROMETHYLKETONE | PROTEASE/COFACTOR/LIGAND) |
| | | | | | | | | | (DFFRCMK) WITH CHAIN: C; | |
| 393 | 1dan | L | 276 | 358 | 6.8e−16 | −0.17 | 0.84 | | BLOOD COAGULATION FACTOR | BLOOD COAGULATION, SERINE |
| | | | | | | | | | VIIA; CHAIN: L, H; SOLUBLE | PROTEASE, COMPLEX, CO-FACTOR, |
| | | | | | | | | | TISSUE FACTOR; CHAIN: T, U; D- | 2 RECEPTOR ENZYME, INHIBITOR, |
| | | | | | | | | | PHE-PHE-ARG- | GLA, EGF, 3 COMPLEX (SERINE |
| | | | | | | | | | CHLOROMETHYLKETONE | PROTEASE/COFACTOR/LIGAND) |
| | | | | | | | | | (DFFRCMK) WITH CHAIN: C; | |
| 393 | 1dan | L | 317 | 397 | 3.4e−16 | −0.32 | 0.47 | | BLOOD COAGULATION FACTOR | BLOOD COAGULATION, SERINE |
| | | | | | | | | | VIIA; CHAIN: L, H; SOLUBLE | PROTEASE, COMPLEX, CO-FACTOR, |
| | | | | | | | | | TISSUE FACTOR; CHAIN: T, U; D- | 2 RECEPTOR ENZYME, INHIBITOR, |
| | | | | | | | | | PHE-PHE-ARG- | GLA, EGF, 3 COMPLEX (SERINE |
| | | | | | | | | | CHLOROMETHYLKETONE | PROTEASE/COFACTOR/LIGAND) |
| | | | | | | | | | (DFFRCMK) WITH CHAIN: C; | |
| 393 | 1dan | L | 332 | 451 | 9e−25 | −0.23 | 0.17 | | BLOOD COAGULATION FACTOR | BLOOD COAGULATION, SERINE |
| | | | | | | | | | VIIA; CHAIN: L, H; SOLUBLE | PROTEASE, COMPLEX, CO-FACTOR, |
| | | | | | | | | | TISSUE FACTOR; CHAIN: T, U; D- | 2 RECEPTOR ENZYME, INHIBITOR, |
| | | | | | | | | | PHE-PHE-ARG- | GLA, EGF, 3 COMPLEX (SERINE |
| | | | | | | | | | CHLOROMETHYLKETONE | PROTEASE/COFACTOR/LIGAND) |
| | | | | | | | | | (DFFRCMK) WITH CHAIN: C; | |
| 393 | 1dan | L | 336 | 447 | 1.7e−18 | −0.42 | 0.00 | | BLOOD COAGULATION FACTOR | BLOOD COAGULATION, SERINE |
| | | | | | | | | | VIIA; CHAIN: L, H; SOLUBLE | PROTEASE, COMPLEX, CO-FACTOR, |
| | | | | | | | | | TISSUE FACTOR; CHAIN: T, U; D- | 2 RECEPTOR ENZYME, INHIBITOR, |
| | | | | | | | | | PHE-PHE-ARG- | GLA, EGF, 3 COMPLEX (SERINE |
| | | | | | | | | | CHLOROMETHYLKETONE | PROTEASE/COFACTOR/LIGAND) |
| | | | | | | | | | (DFFRCMK) WITH CHAIN: C; | |
| 393 | 1dan | L | 372 | 492 | 9e−26 | −0.12 | 0.05 | | BLOOD COAGULATION FACTOR | BLOOD COAGULATION, SERINE |
| | | | | | | | | | VIIA; CHAIN: L, H; SOLUBLE | PROTEASE, COMPLEX, CO-FACTOR, |
| | | | | | | | | | TISSUE FACTOR; CHAIN: T, U; D- | 2 RECEPTOR ENZYME, INHIBITOR, |
| | | | | | | | | | PHE-PHE-ARG- | GLA, EGF, 3 COMPLEX (SERINE |
| | | | | | | | | | CHLOROMETHYLKETONE | PROTEASE/COFACTOR/LIGAND) |
| | | | | | | | | | (DFFRCMK) WITH CHAIN: C; | |
| 393 | 1dan | L | 412 | 535 | 1.2e−30 | 0.20 | 0.22 | | BLOOD COAGULATION FACTOR | BLOOD COAGULATION, SERINE |
| | | | | | | | | | VIIA; CHAIN: L, H; SOLUBLE | PROTEASE, COMPLEX, CO-FACTOR, |
| | | | | | | | | | TISSUE FACTOR; CHAIN: T, U; D- | 2 RECEPTOR ENZYME, INHIBITOR, |
| | | | | | | | | | PHE-PHE-ARG- | GLA, EGF, 3 COMPLEX (SERINE |
| | | | | | | | | | CHLOROMETHYLKETONE | PROTEASE/COFACTOR/LIGAND) |
| | | | | | | | | | (DFFRCMK) WITH CHAIN: C; | |
| 393 | 1dan | L | 439 | 528 | 1.7e−17 | −0.09 | 0.94 | | BLOOD COAGULATION FACTOR | BLOOD COAGULATION, SERINE |
| | | | | | | | | | VIIA; CHAIN: L, H; SOLUBLE | PROTEASE, COMPLEX, CO-FACTOR, |
| | | | | | | | | | TISSUE FACTOR; CHAIN: T, U; D- | 2 RECEPTOR ENZYME, INHIBITOR, |
| | | | | | | | | | PHE-PHE-ARG- | (GLA, EGF, 3 COMPLEX (SERINE |
| | | | | | | | | | CHLOROMETHYLKETONE | PROTEASE/COFACTOR/LIGAND) |
| | | | | | | | | | (DFFRCMK) WITH CHAIN: C; | |
| 393 | 1dqb | A | 438 | 525 | 7.5e−17 | 0.40 | 0.98 | | THROMBOMODULIN; CHAIN: A; | MEMBRANE PROTEIN NMR, |
| | | | | | | | | | | THROMBIN, EGF MODULE, |
| | | | | | | | | | | ANTICOAGULANT, |
| | | | | | | | | | | GLYCOSYLATION |
| 393 | 1dva | L | 317 | 397 | 3.4e−16 | −0.62 | 0.58 | | DES-GLA FACTOR VIIA (HEAVY | HYDROLASE/HYDROLASE |
| | | | | | | | | | CHAIN); CHAIN: H, I; DES-GLA | INHIBITOR PROTEIN-PEPTIDE |
| | | | | | | | | | FACTOR VIIA (LIGHT CHAIN); | COMPLEX |
| | | | | | | | | | CHAIN: L, M; (DPN)-PHE-ARG; | |
| | | | | | | | | | CHAIN: C, D; PEPTIDE E-76; | |
| | | | | | | | | | CHAIN: X, Y; | |
| 393 | 1dva | L | 439 | 528 | 1.7e−17 | 0.21 | 0.84 | | DES-GLA FACTOR VIIA (HEAVY | HYDROLASE/HYDROLASE |
| | | | | | | | | | CHAIN); CHAIN: H, I; DES-GLA | INHIBITOR PROTEIN-PEPTIDE |
| | | | | | | | | | FACTOR VIIA (LIGHT CHAIN); | COMPLEX |
| | | | | | | | | | CHAIN: L, M; (DPN)-PHE-ARG; | |
| | | | | | | | | | CHAIN: C, D; PEPTIDE E-76; | |
| | | | | | | | | | CHAIN: X, Y; | |
| 393 | 1dx5 | I | 121 | 233 | 1e−23 | 0.04 | 1.00 | | THROMBIN LIGHT CHAIN; | SERINE PROTEINASE COAGULATION |
| | | | | | | | | | CHAIN: A, B, C, D; THROMBIN | FACTOR II; COAGULATION FACTOR |
| | | | | | | | | | HEAVY CHAIN; CHAIN: M, N, O, P; | II; FETOMODULIN, TM, CD141 |
| | | | | | | | | | THROMBOMODULIN; CHAIN: I, J, | ANTIGEN; EGR-CMK SERINE |
| | | | | | | | | | K, L; THROMBIN INHIBITOR L- | PROTEINASE, EGF-LIKE DOMAINS, |
| | | | | | | | | | GLU-L-GLY-L-ARM; CHAIN: E, F, | ANTICOAGULANT COMPLEX, 2 |
| | | | | | | | | | G, H; | ANTIFIBRINOLYTIC COMPLEX |
| 393 | 1dx5 | I | 153 | 274 | 3e−25 | 0.09 | 0.55 | | THROMBIN LIGHT CHAIN; | SERINE PROTEINASE COAGULATION |
| | | | | | | | | | CHAIN: A, B, C, D; THROMBIN | FACTOR II; COAGULATION FACTOR |
| | | | | | | | | | HEAVY CHAIN; CHAIN: M, N, O, P; | II; FETOMODULIN, TM, CD141 |
| | | | | | | | | | THROMBOMODULIN; CHAIN: I, J, | ANTIGEN; EGR-CMK SERINE |
| | | | | | | | | | K, L; THROMBIN INHIBITOR L- | PROTEINASE, EGF-LIKE DOMAINS, |
| | | | | | | | | | GLU-L-GLY-L-ARM; CHAIN: E, F, | ANTICOAGULANT COMPLEX, 2 |
| | | | | | | | | | G, H; | ANTIFIBRINOLYTIC COMPLEX |
| 393 | 1dx5 | I | 195 | 315 | 4.5e−27 | 0.30 | 1.00 | | THROMBIN LIGHT CHAIN; | SERINE PROTEINASE COAGULATION |
| | | | | | | | | | CHAIN: A, B, C, D; THROMBIN | FACTOR II; COAGULATION FACTOR |
| | | | | | | | | | HEAVY CHAIN; CHAIN: M, N, O, P; | II; FETOMODULIN, TM, CD141 |
| | | | | | | | | | THROMBOMODULIN; CHAIN: I, J, | ANTIGEN; EGR-CMK SERINE |
| | | | | | | | | | K, L; THROMBIN INHIBITOR L- | PROTEINASE, EGF-LIKE DOMAINS, |
| | | | | | | | | | GLU-L-GLY-L-ARM; CHAIN: E, F, | ANTICOAGULANT COMPLEX, 2 |
| | | | | | | | | | G, H; | ANTIFIBRINOLYTIC COMPLEX |
| 393 | 1dx5 | I | 235 | 346 | 1.2e−17 | 0.02 | 0.99 | | THROMBIN LIGHT CHAIN; | SERINE PROTEINASE COAGULATION |
| | | | | | | | | | CHAIN: A, B, C, D; THROMBIN | FACTOR II; COAGULATION FACTOR |
| | | | | | | | | | HEAVY CHAIN; CHAIN: M, N, O, P; | II; FETOMODULIN, TM, CD141 |
| | | | | | | | | | THROMBOMODULIN; CHAIN: I, J, | ANTIGEN; EGR-CMK SERINE |
| | | | | | | | | | K, L; THROMBIN INHIBITOR L- | PROTEINASE, EGF-LIKE DOMAINS, |
| | | | | | | | | | GLU-L-GLY-L-ARM; CHAIN: E, F, | ANTICOAGULANT COMPLEX, 2 |
| | | | | | | | | | G, H; | ANTIFIBRINOLYTIC COMPLEX |
| 393 | 1dx5 | I | 236 | 356 | 1.5e−26 | −0.04 | 1.00 | | THROMBIN LIGHT CHAIN; | SERINE PROTEINASE COAGULATION |
| | | | | | | | | | CHAIN: A, B, C, D; THROMBIN | FACTOR II; COAGULATION FACTOR |
| | | | | | | | | | HEAVY CHAIN; CHAIN: M, N, O, P; | II; FETOMODULIN, TM, CD141 |
| | | | | | | | | | THROMBOMODULIN; CHAIN: I, J, | ANTIGEN; EGR-CMK SERINE |
| | | | | | | | | | K, L; THROMBIN INHIBITOR L- | PROTEINASE, EGF-LIKE DOMAINS, |
| | | | | | | | | | GLU-L-GLY-L-ARM; CHAIN: E, F, | ANTICOAGULANT COMPLEX, 2 |
| | | | | | | | | | G, H; | ANTIFIBRINOLYTIC COMPLEX |
| 393 | 1dx5 | I | 318 | 438 | 1.5e−22 | 0.19 | 0.93 | | THROMBIN LIGHT CHAIN; | SERINE PROTEINASE COAGULATION |
| | | | | | | | | | CHAIN: A, B, C, D; THROMBIN | FACTOR II; COAGULATION FACTOR |
| | | | | | | | | | HEAVY CHAIN; CHAIN: M, N, O, P; | II; FETOMODULIN, TM, CD141 |
| | | | | | | | | | THROMBOMODULIN; CHAIN: I, J, | ANTIGEN; EGR-CMK SERINE |
| | | | | | | | | | K, L; THROMBIN INHIBITOR L- | PROTEINASE, EGF-LIKE DOMAINS, |
| | | | | | | | | | GLU-L-GLY-L-ARM; CHAIN: E, F, | ANTICOAGULANT COMPLEX, 2 |
| | | | | | | | | | G, H; | ANTIFIBRINOLYTIC COMPLEX |
| 393 | 1dx5 | I | 359 | 479 | 3e−24 | 0.41 | 1.00 | | THROMBIN LIGHT CHAIN; | SERINE PROTEINASE COAGULATION |
| | | | | | | | | | CHAIN: A, B, C, D; THROMBIN | FACTOR II; COAGULATION FACTOR |
| | | | | | | | | | HEAVY CHAIN; CHAIN: M, N, O, P; | II; FETOMODULIN, TM, CD141 |
| | | | | | | | | | THROMBOMODULIN; CHAIN: I, J, | ANTIGEN; EGR-CMK SERINE |
| | | | | | | | | | K, L; THROMBIN INHIBITOR L- | PROTEINASE, EGF-LIKE DOMAINS, |
| | | | | | | | | | GLU-L-GLY-L-ARM; CHAIN: E, F, | ANTICOAGULANT COMPLEX, 2 |
| | | | | | | | | | G, H; | ANTIFIBRINOLYTIC COMPLEX |
| 393 | 1dx5 | I | 401 | 520 | 3e−24 | 0.61 | 1.00 | | THROMBIN LIGHT CHAIN; | SERINE PROTEINASE COAGULATION |
| | | | | | | | | | CHAIN: A, B, C, D; THROMBIN | FACTOR II; COAGULATION FACTOR |
| | | | | | | | | | HEAVY CHAIN; CHAIN: M, N, O, P; | II; FETOMODULIN, TM, CD141 |
| | | | | | | | | | THROMBOMODULIN; CHAIN: I, J, | ANTIGEN; EGR-CMK SERINE |
| | | | | | | | | | K, L; THROMBIN INHIBITOR L- | PROTEINASE, EGF-LIKE DOMAINS, |
| | | | | | | | | | GLU-L-GLY-L-ARM; CHAIN: E, F, | ANTICOAGULANT COMPLEX, 2 |
| | | | | | | | | | G, H; | ANTIFIBRINOLYTIC COMPLEX |
| 393 | 1dx5 | I | 79 | 188 | 6.8e−15 | −0.40 | 0.05 | | THROMBIN LIGHT CHAIN; | SERINE PROTEINASE COAGULATION |
| | | | | | | | | | CHAIN: A, B, C, D; THROMBIN | FACTOR II; COAGULATION FACTOR |
| | | | | | | | | | HEAVY CHAIN; CHAIN: M, N, O, P; | II; FETOMODULIN, TM, CD141 |
| | | | | | | | | | THROMBOMODULIN; CHAIN: I, J, | ANTIGEN; EGR-CMK SERINE |
| | | | | | | | | | K, L; THROMBIN INHIBITOR L- | PROTEINASE, EGF-LIKE DOMAINS, |
| | | | | | | | | | GLU-L-GLY-L-ARM; CHAIN: E, F, | ANTICOAGULANT COMPLEX, 2 |
| | | | | | | | | | G, H; | ANTIFIBRINOLYTIC COMPLEX |
| 393 | 1emn | | 273 | 347 | 5.1e−19 | 0.06 | 0.78 | | FIBRILLIN; CHAIN: NULL; | MATRIX PROTEIN EXTRACELLULAR |
| | | | | | | | | | | MATRIX, CALCIUM-BINDING, |
| | | | | | | | | | | GLYCOPROTEIN, 2 REPEAT, SIGNAL, |
| | | | | | | | | | | MULTIGENE FAMILY, DISEASE |
| | | | | | | | | | | MUTATION, 3 EGF-LIKE DOMAIN, |
| | | | | | | | | | | HUMAN FIBRILLIN-I FRAGMENT, |
| | | | | | | | | | | MATRIX PROTEIN |
| 393 | 1emn | | 317 | 388 | 3.4e−18 | −0.20 | 0.99 | | FIBRILLIN; CHAIN: NULL; | MATRIX PROTEIN EXTRACELLULAR |
| | | | | | | | | | | MATRIX, CALCIUM-BINDING, |
| | | | | | | | | | | GLYCOPROTEIN, 2 REPEAT, SIGNAL, |
| | | | | | | | | | | MULTIGENE FAMILY, DISEASE |
| | | | | | | | | | | MUTATION, 3 EGF-LIKE DOMAIN, |
| | | | | | | | | | | HUMAN FIBRILLIN-I FRAGMENT, |
| | | | | | | | | | | MATRIX PROTEIN |
| 393 | 1emn | | 440 | 511 | 5.1e−18 | 0.32 | 1.00 | | FIBRILLIN; CHAIN: NULL; | MATRIX PROTEIN EXTRACELLULAR |
| | | | | | | | | | | MATRIX, CALCIUM-BINDING, |
| | | | | | | | | | | GLYCOPROTEIN, 2 REPEAT, SIGNAL, |
| | | | | | | | | | | MULTIGENE FAMILY, DISEASE |
| | | | | | | | | | | MUTATION, 3 EGF-LIKE DOMAIN, |
| | | | | | | | | | | HUMAN FIBRILLIN-I FRAGMENT, |
| | | | | | | | | | | MATRIX PROTEIN |
| 393 | 1fak | L | 150 | 246 | 7.5e−22 | −0.23 | 0.10 | | BLOOD COAGULATION FACTOR | BLOOD CLOTTING |
| | | | | | | | | | VIIA; CHAIN: L; BLOOD | COMPLEX(SERINE |
| | | | | | | | | | COAGULATION FACTOR VIIA; | PROTEASE/COFACTOR/LIGAND), |
| | | | | | | | | | CHAIN: H; SOLUBLE TISSUE | BLOOD COAGULATION, 2 SERINE |
| | | | | | | | | | FACTOR; CHAIN: T; 5L15; CHAIN: | PROTEASE, COMPLEX, CO-FACTOR, |
| | | | | | | | | | I; | RECEPTOR ENZYME, 3 INHIBITOR, |
| | | | | | | | | | | GLA, EGF, COMPLEX (SERINE 4 |
| | | | | | | | | | | PROTEASE/COFACTOR/LIGAND), |
| | | | | | | | | | | BLOOD CLOTTING |
| 393 | 1fak | L | 192 | 287 | 1.5e−21 | −0.05 | 0.24 | | BLOOD COAGULATION FACTOR | BLOOD CLOTTING |
| | | | | | | | | | VIIA; CHAIN: L; BLOOD | COMPLEX(SERINE |
| | | | | | | | | | COAGULATION FACTOR VIIA; | PROTEASE/COFACTOR/LIGAND), |
| | | | | | | | | | CHAIN: H; SOLUBLE TISSUE | BLOOD COAGULATION, 2 SERINE |
| | | | | | | | | | FACTOR; CHAIN: T; 5L15; CHAIN: | PROTEASE, COMPLEX, CO-FACTOR, |
| | | | | | | | | | I; | RECEPTOR ENZYME, 3 INHIBITOR, |
| | | | | | | | | | | GLA, EGF, COMPLEX (SERINE 4 |
| | | | | | | | | | | PROTEASE/COFACTOR/LIGAND), |
| | | | | | | | | | | BLOOD CLOTTING |
| 393 | 1fak | L | 232 | 328 | 3e−23 | 0.08 | 0.80 | | BLOOD COAGULATION FACTOR | BLOOD CLOTTING |
| | | | | | | | | | VIIA; CHAIN: L; BLOOD | COMPLEX(SERINE |
| | | | | | | | | | COAGULATION FACTOR VIIA; | PROTEASE/COFACTOR/LIGAND), |
| | | | | | | | | | CHAIN: H; SOLUBLE TISSUE | BLOOD COAGULATION, 2 SERINE |
| | | | | | | | | | FACTOR; CHAIN: T; 5L15; CHAIN: | PROTEASE, COMPLEX, CO-FACTOR, |
| | | | | | | | | | I; | RECEPTOR ENZYME, 3 INHIBITOR, |
| | | | | | | | | | | GLA, EGF, COMPLEX (SERINE 4 |
| | | | | | | | | | | PROTEASE/COFACTOR/LIGAND), |
| | | | | | | | | | | BLOOD CLOTTING |
| 393 | 1fak | L | 273 | 369 | 3e−18 | −0.27 | 0.15 | | BLOOD COAGULATION FACTOR | BLOOD CLOTTING |
| | | | | | | | | | VIIA; CHAIN: L; BLOOD | COMPLEX(SERINE |
| | | | | | | | | | COAGULATION FACTOR VIIA; | PROTEASE/COFACTOR/LIGAND), |
| | | | | | | | | | CHAIN: H; SOLUBLE TISSUE | BLOOD COAGULATION, 2 SERINE |
| | | | | | | | | | FACTOR; CHAIN: T; 5L15; CHAIN: | PROTEASE, COMPLEX, CO-FACTOR, |
| | | | | | | | | | I; | RECEPTOR ENZYME, 3 INHIBITOR, |
| | | | | | | | | | | GLA, EGF, COMPLEX (SERINE 4 |
| | | | | | | | | | | PROTEASE/COFACTOR/LIGAND), |
| | | | | | | | | | | BLOOD CLOTTING |
| 393 | 1fak | L | 276 | 358 | 6.8e−16 | 0.01 | 0.90 | | BLOOD COAGULATION FACTOR | BLOOD CLOTTING |
| | | | | | | | | | VIIA; CHAIN: L; BLOOD | COMPLEX(SERINE |
| | | | | | | | | | COAGULATION FACTOR VIIA; | PROTEASE/COFACTOR/LIGAND), |
| | | | | | | | | | CHAIN: H; SOLUBLE TISSUE | BLOOD COAGULATION, 2 SERINE |
| | | | | | | | | | FACTOR; CHAIN: T; 5L15; CHAIN: | PROTEASE, COMPLEX, CO-FACTOR, |
| | | | | | | | | | I; | RECEPTOR ENZYME, 3 INHIBITOR, |
| | | | | | | | | | | GLA, EGF, COMPLEX (SERINE 4 |
| | | | | | | | | | | PROTEASE/COFACTOR/LIGAND), |
| | | | | | | | | | | BLOOD CLOTTING |
| 393 | 1fak | L | 317 | 397 | 3.4e−16 | −0.41 | 0.35 | | BLOOD COAGULATION FACTOR | BLOOD CLOTTING |
| | | | | | | | | | VIIA; CHAIN: L; BLOOD | COMPLEX(SERINE |
| | | | | | | | | | COAGULATION FACTOR VIIA; | PROTEASE/COFACTOR/LIGAND), |
| | | | | | | | | | CHAIN: H; SOLUBLE TISSUE | BLOOD COAGULATION, 2 SERINE |
| | | | | | | | | | FACTOR; CHAIN: T; 5L15; CHAIN: | PROTEASE, COMPLEX, CO-FACTOR, |
| | | | | | | | | | I; | RECEPTOR ENZYME, 3 INHIBITOR, |
| | | | | | | | | | | GLA, EGF, COMPLEX (SERINE 4 |
| | | | | | | | | | | PROTEASE/COFACTOR/LIGAND), |
| | | | | | | | | | | BLOOD CLOTTING |
| 393 | 1fak | L | 355 | 451 | 6e−19 | 0.35 | 0.23 | | BLOOD COAGULATION FACTOR | BLOOD CLOTTING |
| | | | | | | | | | VIIA; CHAIN: L; BLOOD | COMPLEX(SERINE |
| | | | | | | | | | COAGULATION FACTOR VIIA; | PROTEASE/COFACTOR/LIGAND), |
| | | | | | | | | | CHAIN: H; SOLUBLE TISSUE | BLOOD COAGULATION, 2 SERINE |
| | | | | | | | | | FACTOR; CHAIN: T; 5L15; CHAIN: | PROTEASE, COMPLEX, CO-FACTOR, |
| | | | | | | | | | I; | RECEPTOR ENZYME, 3 INHIBITOR, |
| | | | | | | | | | | GLA, EGF, COMPLEX (SERINE 4 |
| | | | | | | | | | | PROTEASE/COFACTOR/LIGAND), |
| | | | | | | | | | | BLOOD CLOTTING |
| 393 | 1fak | L | 396 | 492 | 4.5e−19 | 0.09 | 0.10 | | BLOOD COAGULATION FACTOR | BLOOD CLOTTING |
| | | | | | | | | | VIIA; CHAIN: L; BLOOD | COMPLEX(SERINE |
| | | | | | | | | | COAGULATION FACTOR VIIA; | PROTEASE/COFACTOR/LIGAND), |
| | | | | | | | | | CHAIN: H; SOLUBLE TISSUE | BLOOD COAGULATION, 2 SERINE |
| | | | | | | | | | FACTOR; CHAIN: T; 5L15; CHAIN: | PROTEASE, COMPLEX, CO-FACTOR, |
| | | | | | | | | | I; | RECEPTOR ENZYME, 3 INHIBITOR, |
| | | | | | | | | | | GLA, EGF, COMPLEX (SERINE 4 |
| | | | | | | | | | | PROTEASE/COFACTOR/LIGAND), |
| | | | | | | | | | | BLOOD CLOTTING |
| 393 | 1fak | L | 437 | 527 | 3e−21 | 0.44 | 0.76 | | BLOOD COAGULATION FACTOR | BLOOD CLOTTING |
| | | | | | | | | | VIIA; CHAIN: L; BLOOD | COMPLEX(SERINE |
| | | | | | | | | | COAGULATION FACTOR VIIA; | PROTEASE/COFACTOR/LIGAND), |
| | | | | | | | | | CHAIN: H; SOLUBLE TISSUE | BLOOD COAGULATION, 2 SERINE |
| | | | | | | | | | FACTOR; CHAIN: T; 5L15; CHAIN: | PROTEASE, COMPLEX, CO-FACTOR, |
| | | | | | | | | | I; | RECEPTOR ENZYME, 3 INHIBITOR, |
| | | | | | | | | | | GLA, EGF, COMPLEX (SERINE 4 |
| | | | | | | | | | | PROTEASE/COFACTOR/LIGAND), |
| | | | | | | | | | | BLOOD CLOTTING |
| 393 | 1fak | L | 439 | 528 | 1.7e−17 | 0.22 | 0.98 | | BLOOD COAGULATION FACTOR | BLOOD CLOTTING |
| | | | | | | | | | VIIA; CHAIN: L; BLOOD | COMPLEX(SERINE |
| | | | | | | | | | COAGULATION FACTOR VIIA; | PROTEASE/COFACTOR/LIGAND), |
| | | | | | | | | | CHAIN: H; SOLUBLE TISSUE | BLOOD COAGULATION, 2 SERINE |
| | | | | | | | | | FACTOR; CHAIN: T; 5L15; CHAIN: | PROTEASE, COMPLEX, CO-FACTOR, |
| | | | | | | | | | I; | RECEPTOR ENZYME, 3 INHIBITOR, |
| | | | | | | | | | | GLA, EGF, COMPLEX (SERINE 4 |
| | | | | | | | | | | PROTEASE/COFACTOR/LIGAND), |
| | | | | | | | | | | BLOOD CLOTTING |
| 393 | 1ido | | 1 | 109 | 4.5e−24 | 0.33 | 0.84 | | INTEGRIN; CHAIN: NULL; | CELL ADHESION PROTEIN A- |
| | | | | | | | | | | DOMAIN INTEGRIN, CELL ADHESION |
| | | | | | | | | | | PROTEIN, GLYCOPROTEIN, |
| | | | | | | | | | | EXTRACELLULAR 2 MATRIX, |
| | | | | | | | | | | CYTOSKELETON |
| 393 | 1ido | | 527 | 707 | 4.5e−46 | | | 98.35 | INTEGRIN; CHAIN: NULL; | CELL ADHESION PROTEIN A- |
| | | | | | | | | | | DOMAIN INTEGRIN, CELL ADHESION |
| | | | | | | | | | | PROTEIN, GLYCOPROTEIN, |
| | | | | | | | | | | EXTRACELLULAR 2 MATRIX, |
| | | | | | | | | | | CYTOSKELETON |
| 393 | 1ido | | 529 | 706 | 4.5e−46 | 1.04 | 1.00 | | INTEGRIN; CHAIN: NULL; | CELL ADHESION PROTEIN A- |
| | | | | | | | | | | DOMAIN INTEGRIN, CELL ADHESION |
| | | | | | | | | | | PROTEIN, GLYCOPROTEIN, |
| | | | | | | | | | | EXTRACELLULAR 2 MATRIX, |
| | | | | | | | | | | CYTOSKELETON |
| 393 | 1jia | A | 205 | 321 | 1.5e−19 | 0.01 | −0.02 | | PHOSPHOLIPASE A2; CHAIN: A, B; | PHOSPHOLIPASE PHOSPHOLIPASE |
| | | | | | | | | | | A2, AGKISTRODON HALYS PALLAS |
| | | | | | | | | | | CRYSTAL 2 STRUCTURE |
| 393 | 1lfa | A | 1 | 112 | 1.5e−24 | 0.01 | 0.89 | | CD11A; 1LFA 5 CHAIN: A, B; 1LFA 6 | CELL ADHESION LFA-1, ALPHA- |
| | | | | | | | | | | L\, BETA-2 INTEGRIN, A-DOMAIN; |
| | | | | | | | | | | 1LFA 8 |
| 393 | 1lfa | A | 526 | 711 | 1.5e−53 | | | 93.64 | CD11A; 1LFA 5 CHAIN: A, B; 1LFA 6 | CELL ADHESION LFA-1, ALPHA- |
| | | | | | | | | | | L\, BETA-2 INTEGRIN, A-DOMAIN; |
| | | | | | | | | | | 1LFA 8 |
| 393 | 1lfa | A | 526 | 713 | 1.5e−53 | 1.12 | 1.00 | | CD11A; 1LFA 5 CHAIN: A, B; 1LFA 6 | CELL ADHESION LFA-1, ALPHA- |
| | | | | | | | | | | L\, BETA-2 INTEGRIN, A-DOMAIN; |
| | | | | | | | | | | 1LFA 8 |
| 393 | 1pfx | L | 157 | 301 | 4.5e−30 | −0.01 | 0.07 | | FACTOR IXA; CHAIN: C, L,; D- | COMPLEX (BLOOD |
| | | | | | | | | | PHE-PRO-ARG; CHAIN: I; | COAGULATION/INHIBITOR) |
| | | | | | | | | | | CHRISTMAS FACTOR; COMPLEX, |
| | | | | | | | | | | INHIBITOR, HEMOPHILIA/EGF, |
| | | | | | | | | | | BLOOD COAGULATION, 2 PLASMA, |
| | | | | | | | | | | SERINE PROTEASE, CALCIUM- |
| | | | | | | | | | | BINDING, HYDROLASE, 3 |
| | | | | | | | | | | GLYCOPROTEIN |
| 393 | 1pfx | L | 197 | 341 | 3e−29 | −0.15 | 0.81 | | FACTOR IXA; CHAIN: C, L,; D- | COMPLEX (BLOOD |
| | | | | | | | | | PHE-PRO-ARG; CHAIN: I; | COAGULATION/INHIBITOR) |
| | | | | | | | | | | CHRISTMAS FACTOR; COMPLEX, |
| | | | | | | | | | | INHIBITOR, HEMOPHILIA/EGF, |
| | | | | | | | | | | BLOOD COAGULATION, 2 PLASMA, |
| | | | | | | | | | | SERINE PROTEASE, CALCIUM- |
| | | | | | | | | | | BINDING, HYDROLASE, 3 |
| | | | | | | | | | | GLYCOPROTEIN |
| 393 | 1pfx | L | 286 | 423 | 3e−23 | −0.10 | 0.06 | | FACTOR IXA; CHAIN: C, L,; D- | COMPLEX (BLOOD |
| | | | | | | | | | PHE-PRO-ARG; CHAIN: I; | COAGULATION/INHIBITOR) |
| | | | | | | | | | | CHRISTMAS FACTOR; COMPLEX, |
| | | | | | | | | | | INHIBITOR, HEMOPHILIA/EGF, |
| | | | | | | | | | | BLOOD COAGULATION, 2 PLASMA, |
| | | | | | | | | | | SERINE PROTEASE, CALCIUM- |
| | | | | | | | | | | BINDING, HYDROLASE, 3 |
| | | | | | | | | | | GLYCOPROTEIN |
| 393 | 1pfx | L | 403 | 527 | 6e−25 | 0.06 | 0.41 | | FACTOR IXA; CHAIN: C, L,; D- | COMPLEX (BLOOD |
| | | | | | | | | | PHE-PRO-ARG; CHAIN: I; | COAGULATION/INHIBITOR) |
| | | | | | | | | | | CHRISTMAS FACTOR; COMPLEX, |
| | | | | | | | | | | INHIBITOR, HEMOPHILIA/EGF, |
| | | | | | | | | | | BLOOD COAGULATION, 2 PLASMA, |
| | | | | | | | | | | SERINE PROTEASE, CALCIUM- |
| | | | | | | | | | | BINDING, HYDROLASE, 3 |
| | | | | | | | | | | GLYCOPROTEIN |
| 393 | 1pfx | L | 440 | 538 | 1.2e−15 | −0.13 | 0.11 | | FACTOR IXA; CHAIN: C, L,; D- | COMPLEX (BLOOD |
| | | | | | | | | | PHE-PRO-ARG; CHAIN: I; | COAGULATION/INHIBITOR) |
| | | | | | | | | | | CHRISTMAS FACTOR; COMPLEX, |
| | | | | | | | | | | INHIBITOR, HEMOPHILIA/EGF, |
| | | | | | | | | | | BLOOD COAGULATION, 2 PLASMA, |
| | | | | | | | | | | SERINE PROTEASE, CALCIUM- |
| | | | | | | | | | | BINDING, HYDROLASE, 3 |
| | | | | | | | | | | GLYCOPROTEIN |
| 393 | 1qfk | L | 444 | 528 | 1.7e−16 | 0.30 | 0.86 | | COAGULATION FACTOR VIIA | SERINE PROTEASE FVIIA; FVIIA; |
| | | | | | | | | | (LIGHT CHAIN); CHAIN: L; | BLOOD COAGULATION, SERINE |
| | | | | | | | | | COAGULATION FACTOR VIIA | PROTEASE |
| | | | | | | | | | (HEAVY CHAIN); CHAIN: H; | |
| | | | | | | | | | TRIPEPTIDYL INHIBITOR; CHAIN: | |
| | | | | | | | | | C; | |
| 393 | 1xka | L | 444 | 528 | 1.7e−14 | 0.33 | 0.64 | | BLOOD COAGULATION FACTOR | BLOOD COAGULATION FACTOR |
| | | | | | | | | | XA; CHAIN: L, C; | STUART FACTOR; BLOOD |
| | | | | | | | | | | COAGULATION FACTOR, SERINE |
| | | | | | | | | | | PROTEINASE, EPIDERMAL 2 |
| | | | | | | | | | | GROWTH FACTOR LIKE DOMAIN |
| 393 | 1apq | | 120 | 154 | 1.5e−11 | −0.02 | 1.00 | | COMPLEMENT PROTEASE CIR; | COMPLEMENT COMPLEMENT, EGF, |
| | | | | | | | | | CHAIN: NULL; | CALCIUM BINDING, SERINE |
| | | | | | | | | | | PROTEASE |
| 393 | 1aut | L | 80 | 151 | 1.2e−10 | −0.62 | 0.05 | | ACTIVATED PROTEIN C; CHAIN: | COMPLEX (BLOOD |
| | | | | | | | | | C, L; D-PHE-PRO-MAI; CHAIN: P; | COAGULATION/INHIBITOR) |
| | | | | | | | | | | AUTOPROTHROMBIN IIA; |
| | | | | | | | | | | HYDROLASE, SERINE PROTEINASE), |
| | | | | | | | | | | PLASMA CALCIUM BINDING, 2 |
| | | | | | | | | | | GLYCOPROTEIN, COMPLEX (BLOOD |
| | | | | | | | | | | COAGULATION/INHIBITOR) |
| 393 | 1ck4 | A | 5 | 111 | 6e−25 | 0.51 | 1.00 | | INTEGRIN ALPHA-I; CHAIN: A, B; | STRUCTURAL PROTEIN I-DOMAIN, |
| | | | | | | | | | | METAL BINDING, COLLAGEN, |
| | | | | | | | | | | ADHESION |
| 393 | 1ck4 | A | 527 | 709 | 1e−46 | 1.12 | 1.00 | | INTEGRIN ALPHA-I; CHAIN: A, B; | STRUCTURAL PROTEIN I-DOMAIN, |
| | | | | | | | | | | METAL BINDING, COLLAGEN, |
| | | | | | | | | | | ADHESION |
| 393 | 1dan | L | 116 | 205 | 4.5e−20 | −0.44 | 0.65 | | BLOOD COAGULATION FACTOR | BLOOD COAGULATION, SERINE |
| | | | | | | | | | VIIA; CHAIN: L, H; SOLUBLE | PROTEASE, COMPLEX, CO-FACTOR, |
| | | | | | | | | | TISSUE FACTOR; CHAIN: T, U; D- | 2 RECEPTOR ENZYME, INHIBITOR, |
| | | | | | | | | | PHE-PHE-ARG- | GLA, EGF, 3 COMPLEX (SERINE |
| | | | | | | | | | CHLOROMETHYLKETONE | PROTEASE/COFACTOR/LIGAND) |
| | | | | | | | | | (DFFRCMK) WITH CHAIN: C; | |
| 393 | 1dan | L | 124 | 246 | 3e−32 | −0.30 | 0.10 | | BLOOD COAGULATION FACTOR | BLOOD COAGULATION, SERINE |
| | | | | | | | | | VIIA, CHAIN: L, H; SOLUBLE | PROTEASE, COMPLEX, CO-FACTOR, |
| | | | | | | | | | TISSUE FACTOR; CHAIN: T, U; D- | 2 RECEPTOR ENZYME, INHIBITOR, |
| | | | | | | | | | PHE-PHE-ARG- | GLA, EGF, 3 COMPLEX (SERINE |
| | | | | | | | | | CHLOROMETHYLKETONE | PROTEASE/COFACTOR/LIGAND) |
| | | | | | | | | | (DFFRCMK) WITH CHAIN: C; | |
| 393 | 1dan | L | 168 | 287 | 4.5e−31 | −0.15 | 0.55 | | BLOOD COAGULATION FACTOR | BLOOD COAGULATION, SERINE |
| | | | | | | | | | VIIA; CHAIN: L, H; SOLUBLE | PROTEASE, COMPLEX, CO-FACTOR, |
| | | | | | | | | | TISSUE FACTOR; CHAIN: T, U; D- | 2 RECEPTOR ENZYME, INHIBITOR, |
| | | | | | | | | | PHE-PHE-ARG- | GLA, EGF, 3 COMPLEX (SERINE |
| | | | | | | | | | CHLOROMETHYLKETONE | PROTEASE/COFACTOR/LIGAND) |
| | | | | | | | | | (DFFRCMK) WITH CHAIN: C; | |
| 393 | 1dan | L | 207 | 328 | 6e−31 | −0.25 | 0.57 | | BLOOD COAGULATION FACTOR | BLOOD COAGULATION, SERINE |
| | | | | | | | | | VIIA; CHAIN: L, H; SOLUBLE | PROTEASE, COMPLEX, CO-FACTOR, |
| | | | | | | | | | TISSUE FACTOR; CHAIN: T, U; D- | 2 RECEPTOR ENZYME, INHIBITOR, |
| | | | | | | | | | PHE-PHE-ARG- | GLA, EGF, 3 COMPLEX (SERINE |
| | | | | | | | | | CHLOROMETHYLKETONE | PROTEASE/COFACTOR/LIGAND) |
| | | | | | | | | | (DFFRCMK) WITH CHAIN: C; | |
| 393 | 1dan | L | 248 | 369 | 3e−25 | −0.40 | 0.11 | | BLOOD COAGULATION FACTOR | BLOOD COAGULATION, SERINE |
| | | | | | | | | | VIIA; CHAIN: L, H; SOLUBLE | PROTEASE, COMPLEX, CO-FACTOR |
| | | | | | | | | | TISSUE FACTOR; CHAIN: T, U; D- | 2 RECEPTOR ENZYME, INHIBITOR, |
| | | | | | | | | | PHE-PHE-ARG- | GLA, EGF, 3 COMPLEX (SERINE |
| | | | | | | | | | CHLOROMETHYLKETONE | PROTEASE/COFACTOR/LIGAND) |
| | | | | | | | | | (DFFRCMK) WITH CHAIN: C; | |
| 393 | 1dan | L | 273 | 365 | 1.2e−16 | 0.02 | 0.23 | | BLOOD COAGULATION FACTOR | BLOOD COAGULATION, SERINE |
| | | | | | | | | | VIIA; CHAIN: L, H; SOLUBLE | PROTEASE, COMPLEX, CO-FACTOR, |
| | | | | | | | | | TISSUE FACTOR; CHAIN: T, U; D- | 2 RECEPTOR ENZYME, INHIBITOR, |
| | | | | | | | | | PHE-PHE-ARG- | GLA, EGF, 3 COMPLEX (SERINE |
| | | | | | | | | | CHLOROMETHYLKETONE | PROTEASE/COFACTOR/LIGAND) |
| | | | | | | | | | (DFFRCMK) WITH CHAIN: C; | |
| 393 | 1dan | L | 332 | 451 | 9e−25 | −0.23 | 0.17 | | BLOOD COAGULATION FACTOR | BLOOD COAGULATION, SERINE |
| | | | | | | | | | VIIA; CHAIN: L, H; SOLUBLE | PROTEASE, COMPLEX, CO-FACTOR, |
| | | | | | | | | | TISSUE FACTOR; CHAIN: T, U; D- | 2 RECEPTOR ENZYME, INHIBITOR, |
| | | | | | | | | | PHE-PHE-ARG- | GLA, EGF, 3 COMPLEX (SERINE |
| | | | | | | | | | CHLOROMETHYLKETONE | PROTEASE/COFACTOR/LIGAND) |
| | | | | | | | | | (DFFRCMK) WITH CHAIN: C; | |
| 393 | 1dan | L | 372 | 492 | 9e−26 | −0.12 | 0.05 | | BLOOD COAGULATION FACTOR | BLOOD COAGULATION, SERINE |
| | | | | | | | | | VIIA; CHAIN: L, H; SOLUBLE | PROTEASE, COMPLEX, CO-FACTOR, |
| | | | | | | | | | TISSUE FACTOR; CHAIN: T, U; D- | 2 RECEPTOR ENZYME, INHIBITOR, |
| | | | | | | | | | PHE-PHE-ARG- | GLA, EGF, 3 COMPLEX (SERINE |
| | | | | | | | | | CHLOROMETHYLKETONE | PROTEASE/COFACTOR/LIGAND) |
| | | | | | | | | | (DFFRCMK) WITH CHAIN: C; | |
| 393 | 1dan | L | 412 | 535 | 1.2e−30 | 0.20 | 0.22 | | BLOOD COAGULATION FACTOR | BLOOD COAGULATION, SERINE |
| | | | | | | | | | VIIA; CHAIN: L, H; SOLUBLE | PROTEASE, COMPLEX, CO-FACTOR, |
| | | | | | | | | | TISSUE FACTOR; CHAIN: T, U; D- | 2 RECEPTOR ENZYME, INHIBITOR, |
| | | | | | | | | | PHE-PHE-ARG- | GLA, EGF, 3 COMPLEX (SERINE |
| | | | | | | | | | CHLOROMETHYLKETONE | PROTEASE/COFACTOR/LIGAND) |
| | | | | | | | | | (DFFRCMK) WITH CHAIN: C; | |
| 393 | 1dan | L | 439 | 528 | 1.7e−18 | 0.18 | 0.89 | | BLOOD COAGULATION FACTOR | BLOOD COAGULATION, SERINI: |
| | | | | | | | | | VIIA: CHAIN: L, H; SOLUBLE | PROTEASE, COMPLEX, CO-FACTOR, |
| | | | | | | | | | TISSUE FACTOR; CHAIN: T, U; D- | 2 RECEPTOR ENZYME, INHIBITOR, |
| | | | | | | | | | PHE-PHE-ARG- | GLA, EGF, 3 COMPLEX (SERINE |
| | | | | | | | | | CHLOROMETHYLKETONE | PROTEASE/COFACTOR/LIGAND) |
| | | | | | | | | | (DFFRCMK) WITH CHAIN: C; | |
| 393 | 1dqb | A | 315 | 401 | 1.1e−15 | 0.05 | 0.69 | | THROMBOMODULIN; CHAIN: A; | MEMBRANE PROTEIN NMR, |
| | | | | | | | | | | THROMBIN, EGF MODULE, |
| | | | | | | | | | | ANTICOAGULANT, |
| | | | | | | | | | | GLYCOSYLATION |
| 393 | 1dqb | A | 438 | 525 | 7.5e−17 | 0.40 | 0.98 | | THROMBOMODULIN; CHAIN: A; | MEMBRANE PROTEIN NMR, |
| | | | | | | | | | | THROMBIN, EGF MODULE, |
| | | | | | | | | | | ANTICOAGULANT, |
| | | | | | | | | | | GLYCOSYLATION |
| 393 | 1dva | L | 273 | 365 | 1.2e−16 | −0.09 | 0.63 | | DES-GLA FACTOR VIIA (HEAVY | HYDROLASE/HYDROLASE |
| | | | | | | | | | CHAIN); CHAIN: H, I; DES-GLA | INHIBITOR PROTEIN-PEPTIDE |
| | | | | | | | | | FACTOR VIIA (LIGHT CHAIN); | COMPLEX |
| | | | | | | | | | CHAIN: L, M; (DPN)-PHE-ARG; | |
| | | | | | | | | | CHAIN: C, D; PEPTIDE E-76; | |
| | | | | | | | | | CHAIN: X, Y; | |
| 393 | 1dva | L | 439 | 528 | 1.7e−18 | 0.32 | 0.92 | | DES-GLA FACTOR VIIA (HEAVY | HYDROLASE/HYDROLASE |
| | | | | | | | | | CHAIN); CHAIN: H, 1; DES-GLA | INHIBITOR PROTEIN-PEPTIDE |
| | | | | | | | | | FACTOR VIIA (LIGHT CHAIN); | COMPLEX |
| | | | | | | | | | CHAIN: L, M; (DPN)-PHE-ARG; | |
| | | | | | | | | | CHAIN: C, D: PEPTIDE E-76; | |
| | | | | | | | | | CHAIN: X, Y; | |
| 393 | 1dx5 | I | 121 | 233 | 1e−23 | 0.04 | 1.00 | | THROMBIN LIGHT CHAIN; | SERINE PROTEINASE COAGULATION |
| | | | | | | | | | CHAIN: A, B, C, D; THROMBIN | FACTOR II; COAGULATION FACTOR |
| | | | | | | | | | HEAVY CHAIN; CHAIN: M, N, O, P; | II; FETOMODULIN, TM, CD141 |
| | | | | | | | | | THROMBOMODULIN; CHAIN: I, J, | ANTIGEN: EGR-CMK SERINE |
| | | | | | | | | | K, L; THROMBIN INHIBITOR L- | PROTEINASE, EGF-LIKE DOMAINS, |
| | | | | | | | | | GLU-L-GLY-L-ARM; CHAIN: E, F, | ANTICOAGULANT COMPLEX, 2 |
| | | | | | | | | | G, H; | ANTIFIBRINOLYTIC COMPLEX |
| 393 | 1dx5 | I | 153 | 274 | 3e−25 | 0.09 | 0.55 | | THROMBIN LIGHT CHAIN; | SERINE PROTEINASE COAGULATION |
| | | | | | | | | | CHAIN: A, B, C, D; THROMBIN | FACTOR II; COAGULATION FACTOR |
| | | | | | | | | | HEAVY CHAIN; CHAIN: M, N, O, P; | II; FETOMODULIN, TM, CD141 |
| | | | | | | | | | THROMBOMODULIN; CHAIN: I, J, | ANTIGEN; EGR-CMK SERINE |
| | | | | | | | | | K, L; THROMBIN INHIBITOR L- | PROTEINASE, EGF-LIKE DOMAINS, |
| | | | | | | | | | GLU-L-GLY-L-ARM; CHAIN: E, F, | ANTICOAGULANT COMPLEX, 2 |
| | | | | | | | | | G, H; | ANTIFIBRINOLYTIC COMPLEX |
| 393 | 1dx5 | I | 195 | 315 | 4.5e−27 | 0.30 | 1.00 | | THROMBIN LIGHT CHAIN; | SERINE PROTEINASE COAGULATION |
| | | | | | | | | | CHAIN: A, B, C, D; THROMBIN | FACTOR II; COAGULATION FACTOR |
| | | | | | | | | | HEAVY CHAIN; CHAIN: M, N, O, P; | II; FETOMODULIN, TM, CD141 |
| | | | | | | | | | THROMBOMODULIN; CHAIN: I, J, | ANTIGEN; EGR-CMK SERINE |
| | | | | | | | | | K, L; THROMBIN INHIBITOR L- | PROTEINASE, EGF-LIKE DOMAINS, |
| | | | | | | | | | GLU-L-GLY-L-ARM; CHAIN: E, F, | ANTICOAGULANT COMPLEX, 2 |
| | | | | | | | | | G, H; | ANTIFIBRINOLYTIC COMPLEX |
| 393 | 1dx5 | I | 236 | 356 | 1.5e−26 | −0.04 | 1.00 | | THROMBIN LIGHT CHAIN: | SERINE PROTEINASE COAGULATION |
| | | | | | | | | | CHAIN: A, B, C, D: THROMBIN | FACTOR II: COAGULATION FACTOR |
| | | | | | | | | | HEAVY CHAIN: CHAIN: M, N, O, P: | II; FETOMODULIN, TM, CD141 |
| | | | | | | | | | THROMBOMODULIN; CHAIN: I, J, | ANTIGEN; EGR-CMK SERINE |
| | | | | | | | | | K, L; THROMBIN INHIBITOR L- | PROTEINASE, EGF-LIKE DOMAINS, |
| | | | | | | | | | GLU-L-GLY-L-ARM; CHAIN: E, F, | ANTICOAGULANT COMPLEX, 2 |
| | | | | | | | | | G, H; | ANTIFIBRINOLYTIC COMPLEX |
| 393 | 1dx5 | I | 316 | 438 | 3.4e−17 | −0.08 | 0.99 | | THROMBIN LIGHT CHAIN; | SERINE PROTEINASE COAGULATION |
| | | | | | | | | | CHAIN: A, B, C, D; THROMBIN | FACTOR II; COAGULATION FACTOR |
| | | | | | | | | | HEAVY CHAIN; CHAIN: M, N, O, P; | II; FETOMODULIN, TM, CD141 |
| | | | | | | | | | THROMBOMODULIN; CHAIN: I, J, | ANTIGEN; EGR-CMK SERINE |
| | | | | | | | | | K, L; THROMBIN INHIBITOR L- | PROTEINASE, EGF-LIKE DOMAINS, |
| | | | | | | | | | GLU-L-GLY-L-ARM; CHAIN: E, F, | ANTICOAGULANT COMPLEX, 2 |
| | | | | | | | | | G, H; | ANTIFIBRINOLYTIC COMPLEX |
| 393 | 1dx5 | I | 318 | 438 | 1.5e−22 | 0.19 | 0.93 | | THROMBIN LIGHT CHAIN; | SERINE PROTEINASE COAGULATION |
| | | | | | | | | | CHAIN: A, B, C, D; THROMBIN | FACTOR II; COAGULATION FACTOR |
| | | | | | | | | | HEAVY CHAIN; CHAIN: M, N, O, P; | II; FETOMODULIN, TM, CD141 |
| | | | | | | | | | THROMBOMODULIN; CHAIN: I, J, | ANTIGEN; EGR-CMK SERINE |
| | | | | | | | | | K, L; THROMBIN INHIBITOR L- | PROTEINASE, EGF-LIKE DOMAINS, |
| | | | | | | | | | GLU-L-GLY-L-ARM; CHAIN: E, F, | ANTICOAGULANT COMPLEX, 2 |
| | | | | | | | | | G, H; | ANTIFIBRINOLYTIC COMPLEX |
| 393 | 1dx5 | I | 359 | 479 | 3e−24 | 0.41 | 1.00 | | THROMBIN LIGHT CHAIN; | SERINE PROTEINASE COAGULATION |
| | | | | | | | | | CHAIN: A, B, C, D; THROMBIN | FACTOR II; COAGULATION FACTOR |
| | | | | | | | | | HEAVY CHAIN; CHAIN: M, N, O, P; | II; FETOMODULIN, TM, CD141 |
| | | | | | | | | | THROMBOMODULIN; CHAIN: I, J, | ANTIGEN; EGR-CMK SERINE |
| | | | | | | | | | K, L; THROMBIN INHIBITOR L- | PROTEINASE, EGF-LIKE DOMAINS, |
| | | | | | | | | | GLU-L-GLY-L-ARM; CHAIN: E, F, | ANTICOAGULANT COMPLEX, 2 |
| | | | | | | | | | G, H; | ANTIFIBRINOLYTIC COMPLEX |
| 393 | 1dx5 | I | 401 | 520 | 3e−24 | 0.61 | 1.00 | | THROMBIN LIGHT CHAIN; | SERINE PROTEINASE COAGULATION |
| | | | | | | | | | CHAIN: A, B, C, D: THROMBIN | FACTOR II; COAGULATION FACTOR |
| | | | | | | | | | HEAVY CHAIN; CHAIN: M, N, O, P; | II; FETOMODULIN, TM, CD141 |
| | | | | | | | | | THROMBOMODULIN; CHAIN: I, J, | ANTIGEN; EGR-CMK SERINE |
| | | | | | | | | | K, L; THROMBIN INHIBITOR L- | PROTEINASE, EGF-LIKE DOMAINS, |
| | | | | | | | | | GLU-L-GLY-L-ARM; CHAIN: E, F, | ANTICOAGULANT COMPLEX, 2 |
| | | | | | | | | | G, H; | ANTIFIBRINOLYTIC COMPLEX |
| 393 | 1dx5 | I | 442 | 525 | 1.5e−13 | 0.45 | 0.78 | | THROMBIN LIGHT CHAIN: | SERINE PROTEINASE COAGULATION |
| | | | | | | | | | CHAIN: A, B, C, D; THROMBIN | FACTOR II; COAGULATION FACTOR |
| | | | | | | | | | HEAVY CHAIN; CHAIN: M, N, O, P; | II: FETOMODULIN, TM, CD141 |
| | | | | | | | | | THROMBOMODULIN; CHAIN: I, J, | ANTIGEN; EGR-CMK SERINE |
| | | | | | | | | | K, L: THROMBIN INHIBITOR L- | PROTEINASE, EGF-LIKE DOMAINS, |
| | | | | | | | | | GLU-L-GLY-L-ARM; CHAIN: E, F, | ANTICOAGULANT COMPLEX, 2 |
| | | | | | | | | | G, H; | ANTIFIBRINOLYTIC COMPLEX |
| 393 | 1dx5 | I | 77 | 188 | 3.4e−15 | −0.52 | 0.18 | | THROMBIN LIGHT CHAIN; | SERINE PROTEINASE COAGULATION |
| | | | | | | | | | CHAIN: A, B, C, D; THROMBIN | FACTOR II; COAGULATION FACTOR |
| | | | | | | | | | HEAVY CHAIN; CHAIN: M, N, O, P; | II; FETOMODULIN, TM, CD141 |
| | | | | | | | | | THROMBOMODULIN; CHAIN: I, J, | ANTIGEN; EGR-CMK SERINE |
| | | | | | | | | | K, L; THROMBIN INHIBITOR L- | PROTEINASE, EGF-LIKE DOMAINS, |
| | | | | | | | | | GLU-L-GLY-L-ARM; CHAIN: E, F, | ANTICOAGULANT COMPLEX, 2 |
| | | | | | | | | | G, H; | ANTIFIBRINOLYTIC COMPLEX |
| 393 | 1emn | | 112 | 187 | 3.4e−16 | 0.12 | 0.96 | | FIBRILLIN; CHAIN: NULL; | MATRIX PROTEIN EXTRACELLULAR |
| | | | | | | | | | | MATRIX, CALCIUM-BINDING. |
| | | | | | | | | | | GLYCOPROTEIN, 2 REPEAT, SIGNAL, |
| | | | | | | | | | | MULTIGENE FAMILY, DISEASE |
| | | | | | | | | | | MUTATION, 3 EGF-LIKE DOMAIN, |
| | | | | | | | | | | HUMAN FIBRILLIN-I FRAGMENT, |
| | | | | | | | | | | MATRIX PROTEIN |
| 393 | 1emn | | 235 | 306 | 1.7e−18 | 0.27 | 0.81 | | FIBRILLIN; CHAIN: NULL; | MATRIX PROTEIN EXTRACELLULAR |
| | | | | | | | | | | MATRIX, CALCIUM-BINDING, |
| | | | | | | | | | | GLYCOPROTEIN, 2 REPEAT, SIGNAL, |
| | | | | | | | | | | MULTIGENE FAMILY, DISEASE |
| | | | | | | | | | | MUTATION, 3 EGF-LIKE DOMAIN, |
| | | | | | | | | | | HUMAN FIBRILLIN-I FRAGMENT, |
| | | | | | | | | | | MATRIX PROTEIN |
| 393 | 1emn | | 273 | 347 | 1.7e−17 | 0.10 | 0.88 | | FIBRILLIN; CHAIN: NULL; | MATRIX PROTEIN EXTRACELLULAR |
| | | | | | | | | | | MATRIX, CALCIUM-BINDING, |
| | | | | | | | | | | GLYCOPROTEIN, 2 REPEAT, SIGNAL, |
| | | | | | | | | | | MULTIGENE FAMILY, DISEASE |
| | | | | | | | | | | MUTATION, 3 EGF-LIKE DOMAIN, |
| | | | | | | | | | | HUMAN FIBRILLIN-I FRAGMENT, |
| | | | | | | | | | | MATRIX PROTEIN |
| 393 | 1emn | | 317 | 392 | 1e−17 | −0.34 | 0.80 | | FIBRILLIN; CHAIN: NULL; | MATRIX PROTEIN EXTRACELLULAR |
| | | | | | | | | | | MATRIX, CALCIUM-BINDING, |
| | | | | | | | | | | GLYCOPROTEIN, 2 REPEAT, SIGNAL, |
| | | | | | | | | | | MULTIGENE FAMILY, DISEASE |
| | | | | | | | | | | MUTATION, 3 EGF-LIKE DOMAIN, |
| | | | | | | | | | | HUMAN FIBRILLIN-I FRAGMENT, |
| | | | | | | | | | | MATRIX PROTEIN |
| 393 | 1emn | | 710 | 779 | 6.8e−15 | 0.06 | −0.19 | | FIBRILLIN; CHAIN: NULL; | MATRIX PROTEIN EXTRACELLULAR |
| | | | | | | | | | | MATRIX, CALCIUM-BINDING, |
| | | | | | | | | | | GLYCOPROTEIN, 2 REPEAT, SIGNAL, |
| | | | | | | | | | | MULTIGENE FAMILY, DISEASE |
| | | | | | | | | | | MUTATION, 3 EGF-LIKE DOMAIN, |
| | | | | | | | | | | HUMAN FIBRILLIN-I FRAGMENT, |
| | | | | | | | | | | MATRIX PROTEIN |
| 393 | 1fak | L | 107 | 164 | 6e−11 | −0.12 | 0.31 | | BLOOD COAGULATION FACTOR | BLOOD CLOTTING |
| | | | | | | | | | VIIA; CHAIN: L; BLOOD | COMPLEX (SERINE |
| | | | | | | | | | COAGULATION FACTOR VIIA; | PROTEASE/COFACTOR/LIGAND), |
| | | | | | | | | | CHAIN: H; SOLUBLE TISSUE | BLOOD COAGULATION, 2 SERINE |
| | | | | | | | | | FACTOR; CHAIN: T; 5L15; CHAIN: | PROTEASE, COMPLEX, CO-FACTOR, |
| | | | | | | | | | I; | RECEPTOR ENZYME, 3 INHIBITOR, |
| | | | | | | | | | | GLA, EGF, COMPLEX (SERINE 4 |
| | | | | | | | | | | PROTEASE/COFACTOR/LIGAND), |
| | | | | | | | | | | BLOOD CLOTTING |
| 393 | 1fak | L | 150 | 246 | 7.5e−22 | −0.23 | 0.10 | | BLOOD COAGULATION FACTOR | BLOOD CLOTTING |
| | | | | | | | | | VIIA; CHAIN: L; BLOOD | COMPLEX(SERINE |
| | | | | | | | | | COAGULATION FACTOR VIIA; | PROTEASE/COFACTOR/LIGAND), |
| | | | | | | | | | CHAIN: H; SOLUBLE TISSUE | BLOOD COAGULATION, 2 SERINE |
| | | | | | | | | | FACTOR; CHAIN: T; 5L15; CHAIN: | PROTEASE, COMPLEX, CO-FACTOR, |
| | | | | | | | | | I; | RECEPTOR ENZYME, 3 INHIBITOR, |
| | | | | | | | | | | GLA, EGF, COMPLEX (SERINE 4 |
| | | | | | | | | | | PROTEASE/COFACTOR/LIGAND), |
| | | | | | | | | | | BLOOD CLOTTING |
| 393 | 1fak | L | 192 | 287 | 1.5e−21 | −0.05 | 0.24 | | BLOOD COAGULATION FACTOR | BLOOD CLOTTING |
| | | | | | | | | | VIIA; CHAIN: L; BLOOD | COMPLEX(SERINE |
| | | | | | | | | | COAGULATION FACTOR VIIA; | PROTEASE/COFACTOR/LIGAND), |
| | | | | | | | | | CHAIN: H; SOLUBLE TISSUE | BLOOD COAGULATION, 2 SERINE |
| | | | | | | | | | FACTOR; CHAIN: T; 5L15; CHAIN: | PROTEASE, COMPLEX, CO-FACTOR, |
| | | | | | | | | | I; | RECEPTOR ENZYME, 3 INHIBITOR, |
| | | | | | | | | | | GLA, EGF, COMPLEX (SERINE 4 |
| | | | | | | | | | | PROTEASE/COFACTOR/LIGAND). |
| | | | | | | | | | | BLOOD CLOTTING |
| 393 | 1fak | L | 232 | 328 | 3e−23 | 0.08 | 0.80 | | BLOOD COAGULATION FACTOR | BLOOD CLOTTING |
| | | | | | | | | | VIIA; CHAIN: L; BLOOD | COMPLEX(SERINE |
| | | | | | | | | | COAGULATION FACTOR VIIA: | PROTEASE/COFACTOR/LIGAND), |
| | | | | | | | | | CHAIN: H; SOLUBLE TISSUE | BLOOD COAGULATION, 2 SERINE |
| | | | | | | | | | FACTOR; CHAIN: T; 5L15; CHAIN: | PROTEASE, COMPLEX, CO-FACTOR, |
| | | | | | | | | | I; | RECEPTOR ENZYME, 3 INHIBITOR, |
| | | | | | | | | | | GLA, EGF, COMPLEX (SERINE 4 |
| | | | | | | | | | | PROTEASE/COFACTOR/LIGAND), |
| | | | | | | | | | | BLOOD CLOTTING |
| 393 | 1fak | L | 273 | 365 | 1.2e−16 | −0.05 | 0.21 | | BLOOD COAGULATION FACTOR | BLOOD CLOTTING |
| | | | | | | | | | VIIA; CHAIN: L; BLOOD | COMPLEX(SERINE |
| | | | | | | | | | COAGULATION FACTOR VIIA; | PROTEASE/COFACTOR/LIGAND), |
| | | | | | | | | | CHAIN: H; SOLUBLE TISSUE | BLOOD COAGULATION, 2 SERINE |
| | | | | | | | | | FACTOR; CHAIN: T; 5L15; CHAIN: | PROTEASE, COMPLEX, CO-FACTOR, |
| | | | | | | | | | I; | RECEPTOR ENZYME, 3 INHIBITOR, |
| | | | | | | | | | | GLA, EGF, COMPLEX (SERINE 4 |
| | | | | | | | | | | PROTEASE/COFACTOR/LIGAND). |
| | | | | | | | | | | BLOOD CLOTTING |
| 393 | 1fak | L | 273 | 369 | 3e−18 | −0.27 | 0.15 | | BLOOD COAGULATION FACTOR | BLOOD CLOTTING |
| | | | | | | | | | VIIA; CHAIN: L; BLOOD | COMPLEX(SERINE |
| | | | | | | | | | COAGULATION FACTOR VIIA: | PROTEASE/COFACTOR/LIGAND), |
| | | | | | | | | | CHAIN: H; SOLUBLE TISSUE | BLOOD COAGULATION, 2 SERINE |
| | | | | | | | | | FACTOR; CHAIN: T: 5LI5; CHAIN: | PROTEASE, COMPLEX, CO-FACTOR, |
| | | | | | | | | | I; | RECEPTOR ENZYME, 3 INHIBITOR, |
| | | | | | | | | | | GLA, EGF, COMPLEX (SERINE 4 |
| | | | | | | | | | | PROTEASE/COFACTOR/LIGAND), |
| | | | | | | | | | | BLOOD CLOTTING |
| 393 | 1fak | L | 355 | 451 | 6e−19 | 0.35 | 0.23 | | BLOOD COAGULATION FACTOR | BLOOD CLOTTING |
| | | | | | | | | | VIIA; CHAIN: L; BLOOD | COMPLEX(SERINE |
| | | | | | | | | | COAGULATION FACTOR VIIA; | PROTEASE/COFACTOR/LIGAND), |
| | | | | | | | | | CHAIN: H; SOLUBLE TISSUE | BLOOD COAGULATION, 2 SERINE |
| | | | | | | | | | FACTOR; CHAIN: T; 5L15; CHAIN: | PROTEASE, COMPLEX, CO-FACTOR, |
| | | | | | | | | | I; | RECEPTOR ENZYME, 3 INHIBITOR, |
| | | | | | | | | | | GLA, EGF, COMPLEX (SERINE 4 |
| | | | | | | | | | | PROTEASE/COFACTOR/LIGAND), |
| | | | | | | | | | | BLOOD CLOTTING |
| 393 | 1fak | L | 396 | 492 | 4.5e−19 | 0.09 | 0.10 | | BLOOD COAGULATION FACTOR | BLOOD CLOTTING |
| | | | | | | | | | VIIA; CHAIN: L; BLOOD | COMPLEX(SERINE |
| | | | | | | | | | COAGULATION FACTOR VIIA; | PROTEASE/COFACTOR/LIGAND), |
| | | | | | | | | | CHAIN: H; SOLUBLE TISSUE | BLOOD COAGULATION, 2 SERINE |
| | | | | | | | | | FACTOR; CHAIN: T; 5L15; CHAIN: | PROTEASE, COMPLEX, CO-FACTOR, |
| | | | | | | | | | I; | RECEPTOR ENZYME, 3 INHIBITOR, |
| | | | | | | | | | | GLA, EGF, COMPLEX (SERINE 4 |
| | | | | | | | | | | PROTEASE/COFACTOR/LIGAND), |
| | | | | | | | | | | BLOOD CLOTTING |
| 393 | 1fak | L | 437 | 527 | 3e−21 | 0.44 | 0.76 | | BLOOD COAGULATION FACTOR | BLOOD CLOTTING |
| | | | | | | | | | VIIA: CHAIN: L; BLOOD | COMPLEX(SERINE |
| | | | | | | | | | COAGULATION FACTOR VIIA; | PROTEASE/COFACTOR/LIGAND), |
| | | | | | | | | | CHAIN: H: SOLUBLE TISSUE | BLOOD COAGULATION, 2 SERINE |
| | | | | | | | | | FACTOR; CHAIN: T; 5L15; CHAIN: | PROTEASE, COMPLEX, CO-FACTOR, |
| | | | | | | | | | 1; | RECEPTOR ENZYME, 3 INHIBITOR, |
| | | | | | | | | | | GLA, EGF, COMPLEX (SERINE 4 |
| | | | | | | | | | | PROTEASE/COFACTOR/LIGAND), |
| | | | | | | | | | | BLOOD CLOTTING |
| 393 | 1fak | L | 439 | 528 | 1.7e−18 | 0.13 | 0.94 | | BLOOD COAGULATION FACTOR | BLOOD CLOTTING |
| | | | | | | | | | VIIA; CHAIN: L; BLOOD | COMPLEX(SERINE |
| | | | | | | | | | COAGULATION FACTOR VIIA; | PROTEASE/COFACTOR/LIGAND), |
| | | | | | | | | | CHAIN: H; SOLUBLE TISSUE | BLOOD COAGULATION, 2 SERINE |
| | | | | | | | | | FACTOR; CHAIN: T; 5L15; CHAIN: | PROTEASE, COMPLEX, CO-FACTOR. |
| | | | | | | | | | 1; | RECEPTOR ENZYME, 3 INHIBITOR. |
| | | | | | | | | | | GLA, EGF, COMPLEX (SERINE 4 |
| | | | | | | | | | | PROTEASE/COFACTOR/LIGAND), |
| | | | | | | | | | | BLOOD CLOTTING |
| 393 | 1ido | | 1 | 109 | 4.5e−24 | 0.33 | 0.84 | | INTEGRIN; CHAIN: NULL; | CELL ADHESION PROTEIN A- |
| | | | | | | | | | | DOMAIN INTEGRIN, CELL ADHESION |
| | | | | | | | | | | PROTEIN, GLYCOPROTEIN, |
| | | | | | | | | | | EXTRACELLULAR 2 MATRIX, |
| | | | | | | | | | | CYTOSKELETON |
| 393 | 1ido | | 527 | 707 | 4.5e−46 | | | 98.35 | INTEGRIN; CHAIN: NULL; | CELL ADHESION PROTEIN A- |
| | | | | | | | | | | DOMAIN INTEGRIN, CELL ADHESION |
| | | | | | | | | | | PROTEIN, GLYCOPROTEIN, |
| | | | | | | | | | | EXTRACELLULAR 2 MATRIX, |
| | | | | | | | | | | CYTOSKELETON |
| 393 | 1ido | | 529 | 706 | 4.5e−46 | 1.04 | 1.00 | | INTEGRIN; CHAIN: NULL; | CELL ADHESION PROTEIN A- |
| | | | | | | | | | | DOMAIN INTEGRIN, CELL ADHESION |
| | | | | | | | | | | PROTEIN, GLYCOPROTEIN, |
| | | | | | | | | | | EXTRACELLULAR 2 MATRIX, |
| | | | | | | | | | | CYTOSKELETON |
| 393 | 1jia | A | 205 | 321 | 1.5e−19 | 0.01 | −0.02 | | PHOSPHOLIPASE A2; CHAIN: A, B; | PHOSPHOLIPASE PHOSPHOLIPASE |
| | | | | | | | | | | A2, AGKISTRODON HALYS PALLAS |
| | | | | | | | | | | CRYSTAL 2 STRUCTURE |
| 393 | 1lfa | A | 1 | 112 | 1.5e−24 | 0.01 | 0.89 | | CDIIA; ILFA 5 CHAIN: A, B; ILFA 6 | CELL ADHESION LFA-1, ALPHA- |
| | | | | | | | | | | L\,BETA-2 INTEGRIN, A-DOMAIN; |
| | | | | | | | | | | ILFA 8 |
| 393 | 1lfa | A | 526 | 711 | 1.5e−53 | | | 93.74 | CDIIA; ILFA 5 CHAIN: A, B; ILFA 6 | CELL ADHESION LFA-1, ALPHA- |
| | | | | | | | | | | L\,BETA-2 INTEGRIN, A-DOMAIN; |
| | | | | | | | | | | ILFA 8 |
| 393 | 1lfa | A | 526 | 713 | 1.5e−53 | 1.12 | 1.00 | | CDIIA; ILFA 5 CHAIN: A, B; ILFA 6 | CELL ADHESION LFA-1, ALPHA- |
| | | | | | | | | | | L\,BETA-2 INTEGRIN, A-DOMAIN; |
| | | | | | | | | | | 1LFA 8 |
| 393 | 1pfx | L | 157 | 301 | 4.5e−30 | −0.01 | 0.07 | | FACTOR IXA; CHAIN: C, L,; D- | COMPLEX (BLOOD |
| | | | | | | | | | PHE-PRO-ARG; CHAIN: 1; | COAGULATION/INHIBITOR) |
| | | | | | | | | | | CHRISTMAS FACTOR; COMPLEX, |
| | | | | | | | | | | INHIBITOR, HEMOPHILIA/EGF, |
| | | | | | | | | | | BLOOD COAGULATION, 2 PLASMA, |
| | | | | | | | | | | SERINE PROTEASE, CALCIUM- |
| | | | | | | | | | | BINDING, HYDROLASE, 3 |
| | | | | | | | | | | GLYCOPROTEIN |
| 393 | 1pfx | L | 197 | 341 | 3e−29 | −0.15 | 0.81 | | FACTOR IXA; CHAIN: C, L,; D- | COMPLEX (BLOOD |
| | | | | | | | | | PHE-PRO-ARG; CHAIN: 1; | COAGULATION/INHIBITOR) |
| | | | | | | | | | | CHRISTMAS FACTOR; COMPLEX, |
| | | | | | | | | | | INHIBITOR, HEMOPHILIA/EGF, |
| | | | | | | | | | | BLOOD COAGULATION, 2 PLASMA, |
| | | | | | | | | | | SERINE PROTEASE, CALCIUM- |
| | | | | | | | | | | BINDING, HYDROLASE, 3 |
| | | | | | | | | | | GLYCOPROTEIN |
| 393 | 1pfx | L | 286 | 423 | 3e−23 | −0.10 | 0.06 | | FACTOR IXA; CHAIN: C, L,; D- | COMPLEX (BLOOD |
| | | | | | | | | | PHE-PRO-ARG; CHAIN: 1; | COAGULATION/INHIBITOR) |
| | | | | | | | | | | CHRISTMAS FACTOR; COMPLEX, |
| | | | | | | | | | | INHIBITOR, HEMOPHILIA/EGF, |
| | | | | | | | | | | BLOOD COAGULATION, 2 PLASMA, |
| | | | | | | | | | | SERINE PROTEASE, CALCIUM- |
| | | | | | | | | | | BINDING, HYDROLASE, 3 |
| | | | | | | | | | | GLYCOPROTEIN |
| 393 | 1pfx | L | 403 | 527 | 6e−25 | 0.06 | 0.41 | | FACTOR IXA: CHAIN: C, L,; D- | COMPLEX (BLOOD |
| | | | | | | | | | PHE-PRO-ARG; CHAIN: 1; | COAGULATION/INHIBITOR) |
| | | | | | | | | | | CHRISTMAS FACTOR; COMPLEX, |
| | | | | | | | | | | INHIBITOR, HEMOPHILIA/EGF, |
| | | | | | | | | | | BLOOD COAGULATION, 2 PLASMA, |
| | | | | | | | | | | SERINE PROTEASE, CALCIUM- |
| | | | | | | | | | | BINDING, HYDROLASE, 3 |
| | | | | | | | | | | GLYCOPROTEIN |
| 393 | 1pfx | L | 440 | 536 | 8.5e−15 | 0.30 | 0.94 | | FACTOR IXA; CHAIN: C, L,; D- | COMPLEX (BLOOD |
| | | | | | | | | | PHE-PRO-ARG; CHAIN: 1; | COAGULATION/INHIBITOR) |
| | | | | | | | | | | CHRISTMAS FACTOR; COMPLEX, |
| | | | | | | | | | | INHIBITOR, HEMOPHILIA/EGF, |
| | | | | | | | | | | BLOOD COAGULATION, 2 PLASMA, |
| | | | | | | | | | | SERINE PROTEASE, CALCIUM- |
| | | | | | | | | | | BINDING, HYDROLASE, 3 |
| | | | | | | | | | | GLYCOPROTEIN |
| 393 | 1qfk | L | 444 | 528 | 3.4e−17 | 0.06 | 0.92 | | COAGULATION FACTOR VIIA | SERINE PROTEASE FVIIA; FVIIA; |
| | | | | | | | | | (LIGHT CHAIN); CHAIN: L; | BLOOD COAGULATION, SERINE |
| | | | | | | | | | COAGULATION FACTOR VIIA | PROTEASE |
| | | | | | | | | | (HEAVY CHAIN); CHAIN: H; | |
| | | | | | | | | | TRIPEPTIDYL INHIBITOR; CHAIN: | |
| | | | | | | | | | C; | |
| 393 | 1xka | L | 444 | 528 | 1.5e−14 | 0.33 | 0.64 | | BLOOD COAGULATION FACTOR | BLOOD COAGULATION FACTOR |
| | | | | | | | | | XA; CHAIN: L, C; | STUART FACTOR; BLOOD |
| | | | | | | | | | | COAGULATION FACTOR, SERINE |
| | | | | | | | | | | PROTEINASE, EPIDERMAL 2 |
| | | | | | | | | | | GROWTH FACTOR LIKE DOMAIN |
| 394 | 1apq | | 120 | 154 | 1.5e−11 | −0.02 | 1.00 | | COMPLEMENT PROTEASE CIR; | COMPLEMENT COMPLEMENT, EGF, |
| | | | | | | | | | CHAIN: NULL; | CALCIUM BINDING, SERINE |
| | | | | | | | | | | PROTEASE |
| 394 | 1ck4 | A | 5 | 111 | 6e−25 | 0.51 | 1.00 | | INTEGRIN ALPHA-1; CHAIN: A, B; | STRUCTURAL PROTEIN 1-DOMAIN, |
| | | | | | | | | | | METAL BINDING, COLLAGEN, |
| | | | | | | | | | | ADHESION |
| 394 | 1ck4 | A | 527 | 709 | 1e−46 | 1.12 | 1.00 | | INTEGRIN ALPHA-1; CHAIN: A, B; | STRUCTURAL PROTEIN 1-DOMAIN, |
| | | | | | | | | | | METAL BINDING, COLLAGEN, |
| | | | | | | | | | | ADHESION |
| 394 | 1dan | L | 116 | 205 | 4.5e−20 | −0.44 | 0.65 | | BLOOD COAGULATION FACTOR | BLOOD COAGULATION, SERINE |
| | | | | | | | | | VIIA; CHAIN: L, H; SOLUBLE | PROTEASE, COMPLEX, CO-FACTOR, |
| | | | | | | | | | TISSUE FACTOR; CHAIN: T, U; D- | 2 RECEPTOR ENZYME, INHIBITOR, |
| | | | | | | | | | PHE-PHE-ARG- | GLA, EGF, 3 COMPLEX (SERINE |
| | | | | | | | | | CHLOROMETHYLKETONE | PROTEASE/COFACTOR/LIGAND) |
| | | | | | | | | | DFFRCMK) WITH CHAIN: C; | |
| 394 | 1dan | L | 124 | 246 | 3e−32 | −0.30 | 0.10 | | BLOOD COAGULATION FACTOR | BLOOD COAGULATION, SERINE |
| | | | | | | | | | VIIA; CHAIN: L, H; SOLUBLE | PROTEASE, COMPLEX, CO-FACTOR, |
| | | | | | | | | | TISSUE FACTOR: CHAIN: T, U: D- | 2 RECEPTOR ENZYME, INHIBITOR, |
| | | | | | | | | | PHE-PHE-ARG- | GLA, EGF, 3 COMPLEX (SERINE |
| | | | | | | | | | CHLOROMETHYLKETONE | PROTEASE/COFACTOR/LIGAND) |
| | | | | | | | | | (DFFRCMK) WITH CHAIN: C; | |
| 394 | 1dan | L | 168 | 287 | 4.5e−31 | −0.15 | 0.55 | | BLOOD COAGULATION FACTOR | BLOOD COAGULATION, SERINE |
| | | | | | | | | | VIIA; CHAIN: L, H; SOLUBLE | PROTEASE, COMPLEX, CO-FACTOR, |
| | | | | | | | | | TISSUE FACTOR; CHAIN: T, U; D- | 2 RECEPTOR ENZYME, INHIBITOR, |
| | | | | | | | | | PHE-PHE-ARG- | GLA, EGF, 3 COMPLEX (SERINE |
| | | | | | | | | | CHLOROMETHYLKETONE | PROTEASE/COFACTOR/LIGAND) |
| | | | | | | | | | (DFFRCMK) WITH CHAIN: C; | |
| 394 | 1dan | L | 207 | 328 | 6e−31 | −0.25 | 0.57 | | BLOOD COAGULATION FACTOR | BLOOD COAGULATION, SERINE |
| | | | | | | | | | VIIA; CHAIN: L, H; SOLUBLE | PROTEASE, COMPLEX, CO-FACTOR, |
| | | | | | | | | | TISSUE FACTOR; CHAIN: T, U; D- | 2 RECEPTOR ENZYME, INHIBITOR, |
| | | | | | | | | | PHE-PHE-ARG- | GLA, EGF, 3 COMPLEX (SERINE |
| | | | | | | | | | CHLOROMETHYLKETONE | PROTEASE/COFACTOR/LIGAND) |
| | | | | | | | | | (DFFRCMK) WITH CHAIN: C; | |
| 394 | 1dan | L | 248 | 369 | 3e−25 | −0.40 | 0.11 | | BLOOD COAGULATION FACTOR | BLOOD COAGULATION, SERINE |
| | | | | | | | | | VIIA; CHAIN: L, H; SOLUBLE | PROTEASE, COMPLEX, CO-FACTOR, |
| | | | | | | | | | TISSUE FACTOR; CHAIN: T, U; D- | 2 RECEPTOR ENZYME, INHIBITOR, |
| | | | | | | | | | PHE-PHE-ARG- | GLA, EGF, 3 COMPLEX (SERINE |
| | | | | | | | | | CHLOROMETHYLKETONE | PROTEASE/COFACTOR/LIGAND) |
| | | | | | | | | | (DFFRCMK) WITH CHAIN: C; | |
| 394 | 1dan | L | 276 | 358 | 6.8e−16 | −0.17 | 0.84 | | BLOOD COAGULATION FACTOR | BLOOD COAGULATION, SERINE |
| | | | | | | | | | VIIA; CHAIN: L, H; SOLUBLE | PROTEASE, COMPLEX, CO-FACTOR, |
| | | | | | | | | | TISSUE FACTOR; CHAIN: T, U; D- | 2 RECEPTOR ENZYME, INHIBITOR, |
| | | | | | | | | | PHE-PHE-ARG- | GLA, EGF, 3 COMPLEX (SERINE |
| | | | | | | | | | CHLOROMETHYLKETONE | PROTEASE/COFACTOR/LIGAND) |
| | | | | | | | | | (DFFRCMK) WITH CHAIN: C; | |
| 394 | 1dan | L | 317 | 397 | 3.4e−16 | −0.32 | 0.47 | | BLOOD COAGULATION FACTOR | BLOOD COAGULATION, SERINE |
| | | | | | | | | | VIIA; CHAIN: L, H; SOLUBLE | PROTEASE, COMPLEX, CO-FACTOR, |
| | | | | | | | | | TISSUE FACTOR; CHAIN: T, U; D- | 2 RECEPTOR ENZYME, INHIBITOR, |
| | | | | | | | | | PHE-PHE-ARG- | GLA, EGF, 3 COMPLEX (SERINE |
| | | | | | | | | | CHLOROMETHYLKETONE | PROTEASE/COFACTOR/LIGAND) |
| | | | | | | | | | (DFFRCMK) WITH CHAIN: C; | |
| 394 | 1dan | L | 332 | 451 | 9e−25 | −0.23 | 0.17 | | BLOOD COAGULATION FACTOR | BLOOD COAGULATION, SERINE |
| | | | | | | | | | VIIA; CHAIN: L, H; SOLUBLE | PROTEASE, COMPLEX, CO-FACTOR, |
| | | | | | | | | | TISSUE FACTOR; CHAIN: T, U; D- | 2 RECEPTOR ENZYME, INHIBITOR, |
| | | | | | | | | | PHE-PHE-ARG- | GLA, EGF, 3 COMPLEX (SERINE |
| | | | | | | | | | CHLOROMETHYLKETONE | PROTEASE/COFACTOR/LIGAND) |
| | | | | | | | | | (DFFRCMK) WITH CHAIN: C; | |
| 394 | 1dan | L | 336 | 447 | 1.7e−18 | −0.42 | 0.00 | | BLOOD COAGULATION FACTOR | BLOOD COAGULATION, SERINE |
| | | | | | | | | | VIIA; CHAIN: L, H; SOLUBLE | PROTEASE, COMPLEX, CO-FACTOR, |
| | | | | | | | | | TISSUE FACTOR; CHAIN: T, U; D- | 2 RECEPTOR ENZYME, INHIBITOR, |
| | | | | | | | | | PHE-PHE-ARG- | GLA, EGF, 3 COMPLEX (SERINE |
| | | | | | | | | | CHLOROMETHYLKETONE | PROTEASE/COFACTOR/LIGAND) |
| | | | | | | | | | (DFFRCMK) WITH CHAIN: C; | |
| 394 | 1dan | L | 372 | 492 | 9e−26 | −0.12 | 0.05 | | BLOOD COAGULATION FACTOR | BLOOD COAGULATION, SERINE |
| | | | | | | | | | VIIA; CHAIN: L, H; SOLUBLE | PROTEASE, COMPLEX, CO-FACTOR, |
| | | | | | | | | | TISSUE FACTOR; CHAIN: T, U; D- | 2 RECEPTOR ENZYME, INHIBITOR, |
| | | | | | | | | | PHE-PHE-ARG- | GLA, EGF, 3 COMPLEX (SERINE |
| | | | | | | | | | CHLOROMETHYLKETONE | PROTEASE/COFACTOR/LIGAND) |
| | | | | | | | | | (DFFRCMK) WITH CHAIN: C; | |
| 394 | 1dan | L | 412 | 535 | 1.2e−30 | 0.20 | 0.22 | | BLOOD COAGULATION FACTOR | BLOOD COAGULATION, SERINE |
| | | | | | | | | | VIIA; CHAIN: L, H; SOLUBLE | PROTEASE, COMPLEX, CO-FACTOR, |
| | | | | | | | | | TISSUE FACTOR; CHAIN: T, U; D- | 2 RECEPTOR ENZYME, INHIBITOR, |
| | | | | | | | | | PHE-PHE-ARG- | GLA, EGF, 3 COMPLEX (SERINE |
| | | | | | | | | | CHLOROMETHYLKETONE | PROTEASE/COFACTOR/LIGAND) |
| | | | | | | | | | (DFFRCMK) WITH CHAIN: C; | |
| 394 | 1dan | L | 439 | 528 | 1.7e−17 | −0.09 | 0.94 | | BLOOD COAGULATION FACTOR | BLOOD COAGULATION, SERINE |
| | | | | | | | | | VIIA; CHAIN: L, H; SOLUBLE | PROTEASE, COMPLEX, CO-FACTOR, |
| | | | | | | | | | TISSUE FACTOR; CHAIN: T, U; D- | 2 RECEPTOR ENZYME, INHIBITOR, |
| | | | | | | | | | PHE-PHE-ARG- | GLA, EGF, 3 COMPLEX (SERINE |
| | | | | | | | | | CHLOROMETHYLKETONE | PROTEASE/COFACTOR/LIGAND) |
| | | | | | | | | | (DFFRCMK) WITH CHAIN: C; | |
| 394 | 1dqb | A | 438 | 525 | 7.5e−17 | 0.40 | 0.98 | | THROMBOMODULIN; CHAIN: A; | MEMBRANE PROTEIN NMR, |
| | | | | | | | | | | THROMBIN, EGF MODULE, |
| | | | | | | | | | | ANTICOAGULANT, |
| | | | | | | | | | | GLYCOSYLATION |
| 394 | 1dva | L | 317 | 397 | 3.4e−16 | −0.62 | 0.58 | | DES-GLA FACTOR VIIA (HEAVY | HYDROLASE/HYDROLASE |
| | | | | | | | | | CHAIN); CHAIN: H, I; DES-GLA | INHIBITOR PROTEIN-PEPTIDE |
| | | | | | | | | | FACTOR VIIA (LIGHT CHAIN); | COMPLEX |
| | | | | | | | | | CHAIN: L, M; (DPN)-PHE-ARG; | |
| | | | | | | | | | CHAIN: C, D; PEPTIDE E-76; | |
| | | | | | | | | | CHAIN: X, Y; | |
| 394 | 1dva | L | 439 | 528 | 1.7e−17 | 0.21 | 0.84 | | DES-GLA FACTOR VIIA (HEAVY | HYDROLASE/HYDROLASE |
| | | | | | | | | | CHAIN): CHAIN: H, I; DES-GLA | INHIBITOR PROTEIN-PEPTIDE |
| | | | | | | | | | FACTOR VIIA (LIGHT CHAIN); | COMPLEX |
| | | | | | | | | | CHAIN: L, M; (DPN)-PHE-ARG; | |
| | | | | | | | | | CHAIN: C, D; PEPTIDE E-76; | |
| | | | | | | | | | CHAIN: X, Y; | |
| 394 | 1dx5 | I | 121 | 233 | 1e−23 | 0.04 | 1.00 | | THROMBIN LIGHT CHAIN; | SERINE PROTEINASE COAGULATION |
| | | | | | | | | | CHAIN: A, B, C, D; THROMBIN | FACTOR II; COAGULATION FACTOR |
| | | | | | | | | | HEAVY CHAIN; CHAIN: M, N, O, P; | II; FETOMODULIN, TM, CD141 |
| | | | | | | | | | THROMBOMODULIN; CHAIN: I, J, | ANTIGEN; EGR-CMK SERINE |
| | | | | | | | | | K, L; THROMBIN INHIBITOR L- | PROTEINASE, EGF-LIKE DOMAINS, |
| | | | | | | | | | GLU-L-GLY-L-ARM; CHAIN: E, F, | ANTICOAGULANT COMPLEX, 2 |
| | | | | | | | | | G, H; | ANTIFIBRINOLYTIC COMPLEX |
| 394 | 1dx5 | I | 153 | 274 | 3e−25 | 0.09 | 0.55 | | THROMBIN LIGHT CHAIN; | SERINE PROTEINASE COAGULATION |
| | | | | | | | | | CHAIN: A, B, C, D; THROMBIN | FACTOR II; COAGULATION FACTOR |
| | | | | | | | | | HEAVY CHAIN; CHAIN: M, N, 0, P; | II; FETOMODULIN, TM, CD141 |
| | | | | | | | | | THROMBOMODULIN; CHAIN: I, J, | ANTIGEN; EGR-CMK SERINE |
| | | | | | | | | | K, L; THROMBIN INHIBITOR L- | PROTEINASE, EGF-LIKE DOMAINS, |
| | | | | | | | | | GLU-L-GLY-L-ARM; CHAIN: E, F, | ANTICOAGULANT COMPLEX, 2 |
| | | | | | | | | | G, H; | ANTIFIBRINOLYTIC COMPLEX |
| 394 | 1dx5 | I | 195 | 315 | 4.5e−27 | 0.30 | 1.00 | | THROMBIN LIGHT CHAIN; | SERINE PROTEINASE COAGULATION |
| | | | | | | | | | CHAIN: A, B, C, D; THROMBIN | FACTOR II; COAGULATION FACTOR |
| | | | | | | | | | HEAVY CHAIN; CHAIN: M, N, O, P; | II; FETOMODULIN, TM, CD141 |
| | | | | | | | | | THROMBOMODULIN; CHAIN: I, J, | ANTIGEN; EGR-CMK SERINE |
| | | | | | | | | | K, L; THROMBIN INHIBITOR L- | PROTEINASE, EGF-LIKE DOMAINS, |
| | | | | | | | | | GLU-L-GLY-L-ARM; CHAIN: E, F; | ANTICOAGULANT COMPLEX, 2 |
| | | | | | | | | | G, H; | ANTIFIBRINOLYTIC COMPLEX |
| 394 | 1dx5 | I | 235 | 346 | 1.2e−17 | 0.02 | 0.99 | | THROMBIN LIGHT CHAIN: | SERINE PROTEINASE COAGULATION |
| | | | | | | | | | CHAIN: A, B, C, D; THROMBIN | FACTOR II; COAGULATION FACTOR |
| | | | | | | | | | HEAVY CHAIN; CHAIN: M, N, O, P; | II; FETOMODULIN, TM, CDI41 |
| | | | | | | | | | THROMBOMODULIN; CHAIN: I, J, | ANTIGEN; EGR-CMK SERINE |
| | | | | | | | | | K, L; THROMBIN INHIBITOR L- | PROTEINASE, EGF-LIKE DOMAINS, |
| | | | | | | | | | GLU-L-GLY-L-ARM; CHAIN: E, F, | ANTICOAGULANT COMPLEX, 2 |
| | | | | | | | | | G, H; | ANTIFIBRINOLYTIC COMPLEX |
| 394 | 1dx5 | I | 236 | 356 | 1.5e−26 | −0.04 | 1.00 | | THROMBIN LIGHT CHAIN; | SERINE PROTEINASE COAGULATION |
| | | | | | | | | | CHAIN: A, B, C, D; THROMBIN | FACTOR II; COAGULATION FACTOR |
| | | | | | | | | | HEAVY CHAIN; CHAIN: M, N, O, P; | II; FETOMODULIN, TM, CDI41 |
| | | | | | | | | | THROMBOMODULIN; CHAIN: I, J, | ANTIGEN; EGR-CMK SERINE |
| | | | | | | | | | K, L; THROMBIN INHIBITOR L- | PROTEINASE, EGF-LIKE DOMAINS, |
| | | | | | | | | | GLU-L-GLY-L-ARM; CHAIN: E, F, | ANTICOAGULANT COMPLEX, 2 |
| | | | | | | | | | G, H; | ANTIFIBRINOLYTIC COMPLEX |
| 394 | 1dx5 | I | 318 | 438 | 1.5e−22 | 0.19 | 0.93 | | THROMBIN LIGHT CHAIN; | SERINE PROTEINASE COAGULATION |
| | | | | | | | | | CHAIN: A, B, C, D; THROMBIN | FACTOR II; COAGULATION FACTOR |
| | | | | | | | | | HEAVY CHAIN; CHAIN: M, N, O, P; | II; FETOMODULIN, TM, CDI41 |
| | | | | | | | | | THROMBOMODULIN; CHAIN: I, J, | ANTIGEN; EGR-CMK SERINE |
| | | | | | | | | | K, L; THROMBIN INHIBITOR L- | PROTEINASE, EGF-LIKE DOMAINS, |
| | | | | | | | | | GLU-L-GLY-L-ARM; CHAIN: E, F, | ANTICOAGULANT COMPLEX, 2 |
| | | | | | | | | | G, H; | ANTIFIBRINOLYTIC COMPLEX |
| 394 | 1dx5 | I | 359 | 479 | 3e−24 | 0.41 | 1.00 | | THROMBIN LIGHT CHAIN; | SERINE PROTEINASE COAGULATION |
| | | | | | | | | | CHAIN: A, B, C, D; THROMBIN | FACTOR II; COAGULATION FACTOR |
| | | | | | | | | | HEAVY CHAIN; CHAIN: M, N, O, P; | II; FETOMODULIN, TM, CDI41 |
| | | | | | | | | | THROMBOMODULIN; CHAIN: I, J, | ANTIGEN: EGR-CMK SERINE |
| | | | | | | | | | K, L; THROMBIN INHIBITOR L- | PROTEINASE, EGF-LIKE DOMAINS. |
| | | | | | | | | | GLU-L-GLY-L-ARM; CHAIN: E, F, | ANTICOAGULANT COMPLEX, 2 |
| | | | | | | | | | G, H; | ANTIFIBRINOLYTIC COMPLEX |
| 394 | 1dx5 | I | 401 | 520 | 3e−24 | 0.61 | 1.00 | | THROMBIN LIGHT CHAIN; | SERINE PROTEINASE COAGULATION |
| | | | | | | | | | CHAIN: A, B, C, D; THROMBIN | FACTOR II; COAGULATION FACTOR |
| | | | | | | | | | HEAVY CHAIN; CHAIN: M, N, O, P; | II; FETOMODULIN, TM, CDI41 |
| | | | | | | | | | THROMBOMODULIN; CHAIN: I, J, | ANTIGEN; EGR-CMK SERINE |
| | | | | | | | | | K, L; THROMBIN INHIBITOR L- | PROTEINASE, EGF-LIKE DOMAINS, |
| | | | | | | | | | GLU-L-GLY-L-ARM; CHAIN: E, F, | ANTICOAGULANT COMPLEX, 2 |
| | | | | | | | | | G, H; | ANTIFIBRINOLYTIC COMPLEX |
| 394 | 1dx5 | I | 79 | 188 | 6.8e−15 | −0.40 | 0.05 | | THROMBIN LIGHT CHAIN; | SERINE PROTEINASE COAGULATION |
| | | | | | | | | | CHAIN: A, B, C, D; THROMBIN | FACTOR II; COAGULATION FACTOR |
| | | | | | | | | | HEAVY CHAIN; CHAIN: M, N, O, P; | II; FETOMODULIN, TM, CDI41 |
| | | | | | | | | | THROMBOMODULIN; CHAIN: I, J, | ANTIGEN; EGR-CMK SERINE |
| | | | | | | | | | K, L; THROMBIN INHIBITOR L- | PROTEINASE, EGF-LIKE DOMAINS, |
| | | | | | | | | | GLU-L-GLY-L-ARM; CHAIN: E, F, | ANTICOAGULANT COMPLEX, 2 |
| | | | | | | | | | G, H; | ANTIFIBRINOLYTIC COMPLEX |
| 394 | 1emn | | 273 | 347 | 5.1e−19 | 0.06 | 0.78 | | FIBRILLIN; CHAIN: NULL; | MATRIX PROTEIN EXTRACELLULAR |
| | | | | | | | | | | MATRIX, CALCIUM-BINDING, |
| | | | | | | | | | | GLYCOPROTEIN, 2 REPEAT, SIGNAL, |
| | | | | | | | | | | MULTIGENE FAMILY, DISEASE |
| | | | | | | | | | | MUTATION, 3 EGF-LIKE DOMAIN, |
| | | | | | | | | | | HUMAN FIBRILLIN-1 FRAGMENT, |
| | | | | | | | | | | MATRIX PROTEIN |
| 394 | 1emn | | 317 | 388 | 3.4e−18 | −0.20 | 0.99 | | FIBRILLIN; CHAIN: NULL; | MATRIX PROTEIN EXTRACELLULAR |
| | | | | | | | | | | MATRIX, CALCIUM-BINDING, |
| | | | | | | | | | | GLYCOPROTEIN, 2 REPEAT, SIGNAL, |
| | | | | | | | | | | MULTIGENE FAMILY, DISEASE |
| | | | | | | | | | | MUTATION, 3 EGF-LIKE DOMAIN, |
| | | | | | | | | | | HUMAN FIBRILLIN-1 FRAGMENT, |
| | | | | | | | | | | MATRIX PROTEIN |
| 394 | 1emn | | 440 | 511 | 5.1e−18 | 0.32 | 1.00 | | FIBRILLIN; CHAIN: NULL; | MATRIX PROTEIN EXTRACELLULAR |
| | | | | | | | | | | MATRIX, CALCIUM-BINDING, |
| | | | | | | | | | | GLYCOPROTEIN, 2 REPEAT, SIGNAL, |
| | | | | | | | | | | MULTIGENE FAMILY, DISEASE |
| | | | | | | | | | | MUTATION, 3 EGF-LIKE DOMAIN, |
| | | | | | | | | | | HUMAN FIBRILLIN-1 FRAGMENT, |
| | | | | | | | | | | MATRIX PROTEIN |
| 394 | 1fak | L | 150 | 246 | 7.5e−22 | −0.23 | 0.10 | | BLOOD COAGULATION FACTOR | BLOOD CLOTTING |
| | | | | | | | | | VIIA; CHAIN: L; BLOOD | COMPLEX(SERINE |
| | | | | | | | | | COAGULATION FACTOR VIIA; | PROTEASE/COFACTOR/LIGAND), |
| | | | | | | | | | CHAIN: H; SOLUBLE TISSUE | BLOOD COAGULATION, 2 SERINE |
| | | | | | | | | | FACTOR; CHAIN: T; 5L15; CHAIN: | PROTEASE, COMPLEX, CO-FACTOR, |
| | | | | | | | | | 1; | RECEPTOR ENZYME, 3 INHIBITOR, |
| | | | | | | | | | | GLA, EGF, COMPLEX (SERINE 4 |
| | | | | | | | | | | PROTEASE/COFACTOR/LIGAND), |
| | | | | | | | | | | BLOOD CLOTTING |
| 394 | 1fak | L | 192 | 287 | 1.5e−21 | −0.05 | 0.24 | | BLOOD COAGULATION FACTOR | BLOOD CLOTTING |
| | | | | | | | | | VIIA; CHAIN: L; BLOOD | COMPLEX(SERINE |
| | | | | | | | | | COAGULATION FACTOR VIIA; | PROTEASE/COFACTOR/LIGAND), |
| | | | | | | | | | CHAIN: H; SOLUBLE TISSUE | BLOOD COAGULATION, 2 SERINE |
| | | | | | | | | | FACTOR; CHAIN: T; 5L15; CHAIN: | PROTEASE, COMPLEX, CO-FACTOR, |
| | | | | | | | | | 1; | RECEPTOR ENZYME, 3 INHIBITOR, |
| | | | | | | | | | | GLA, EGF, COMPLEX (SERINE 4 |
| | | | | | | | | | | PROTEASE/COFACTOR/LIGAND), |
| | | | | | | | | | | BLOOD CLOTTING |
| 394 | 1fak | L | 232 | 328 | 3e−23 | 0.08 | 0.80 | | BLOOD COAGULATION FACTOR | BLOOD CLOTTING |
| | | | | | | | | | VIIA; CHAIN: L; BLOOD | COMPLEX(SERINE |
| | | | | | | | | | COAGULATION FACTOR VIIA; | PROTEASE/COFACTOR/LIGAND), |
| | | | | | | | | | CHAIN: H; SOLUBLE TISSUE | BLOOD COAGULATION, 2 SERINE |
| | | | | | | | | | FACTOR; CHAIN: T; 5L15; CHAIN: | PROTEASE, COMPLEX, CO-FACTOR, |
| | | | | | | | | | 1; | RECEPTOR ENZYME, 3 INHIBITOR, |
| | | | | | | | | | | GLA, EGF, COMPLEX (SERINE 4 |
| | | | | | | | | | | PROTEASE/COFACTOR/LIGAND), |
| | | | | | | | | | | BLOOD CLOTTING |
| 394 | 1fak | L | 273 | 369 | 3e−18 | −0.27 | 0.15 | | BLOOD COAGULATION FACTOR | BLOOD CLOTTING |
| | | | | | | | | | VIIA; CHAIN: L; BLOOD | COMPLEX(SERINE |
| | | | | | | | | | COAGULATION FACTOR VIIA; | PROTEASE/COFACTOR/LIGAND), |
| | | | | | | | | | CHAIN: H; SOLUBLE TISSUE | BLOOD COAGULATION, 2 SERINE |
| | | | | | | | | | FACTOR; CHAIN: T; 5L15; CHAIN: | PROTEASE, COMPLEX, CO-FACTOR, |
| | | | | | | | | | 1; | RECEPTOR ENZYME, 3 INHIBITOR, |
| | | | | | | | | | | GLA, EGF, COMPLEX (SERINE 4 |
| | | | | | | | | | | PROTEASE/COFACTOR/LIGAND), |
| | | | | | | | | | | BLOOD CLOTTING |
| 394 | 1fak | L | 276 | 358 | 6.8e−16 | 0.01 | 0.90 | | BLOOD COAGULATION FACTOR | BLOOD CLOTTING |
| | | | | | | | | | VIIA; CHAIN: L; BLOOD | COMPLEX(SERINE |
| | | | | | | | | | COAGULATION FACTOR VIIA; | PROTEASE/COFACTOR/LIGAND), |
| | | | | | | | | | CHAIN: H; SOLUBLE TISSUE | BLOOD COAGULATION, 2 SERINE |
| | | | | | | | | | FACTOR; CHAIN: T; 5L15; CHAIN: | PROTEASE, COMPLEX, CO-FACTOR, |
| | | | | | | | | | 1; | RECEPTOR ENZYME, 3 INHIBITOR, |
| | | | | | | | | | | GLA, EGF, COMPLEX (SERINE 4 |
| | | | | | | | | | | PROTEASE/COFACTOR/LIGAND), |
| | | | | | | | | | | BLOOD CLOTTING |
| 394 | 1fak | L | 317 | 397 | 3.4e−16 | −0.41 | 0.35 | | BLOOD COAGULATION FACTOR | BLOOD CLOTTING |
| | | | | | | | | | VIIA; CHAIN: L; BLOOD | COMPLEX(SERINE |
| | | | | | | | | | COAGULATION FACTOR VIIA; | PROTEASE/COFACTOR/LIGAND), |
| | | | | | | | | | CHAIN: H; SOLUBLE TISSUE | BLOOD COAGULATION, 2 SERINE |
| | | | | | | | | | FACTOR; CHAIN: T; 5L15; CHAIN: | PROTEASE, COMPLEX, CO-FACTOR, |
| | | | | | | | | | 1; | RECEPTOR ENZYME, 3 INHIBITOR, |
| | | | | | | | | | | GLA, EGF, COMPLEX (SERINE 4 |
| | | | | | | | | | | PROTEASE/COFACTOR/LIGAND), |
| | | | | | | | | | | BLOOD CLOTTING |
| 394 | 1fak | L | 355 | 451 | 6e−19 | 0.35 | 0.23 | | BLOOD COAGULATION FACTOR | BLOOD CLOTTING |
| | | | | | | | | | VIIA; CHAIN: L; BLOOD | COMPLEX(SERINE |
| | | | | | | | | | COAGULATION FACTOR VIIA; | PROTEASE/COFACTOR/LIGAND), |
| | | | | | | | | | CHAIN: H; SOLUBLE TISSUE | BLOOD COAGULATION, 2 SERINE |
| | | | | | | | | | FACTOR; CHAIN: T; 5L15; CHAIN: | PROTEASE, COMPLEX, CO-FACTOR, |
| | | | | | | | | | 1; | RECEPTOR ENZYME, 3 INHIBITOR, |
| | | | | | | | | | | GLA, EGF, COMPLEX (SERINE 4 |
| | | | | | | | | | | PROTEASE/COFACTOR/LIGAND), |
| | | | | | | | | | | BLOOD CLOTTING |
| 394 | 1 fak | L | 396 | 492 | 4.5e−19 | 0.09 | 0.10 | | BLOOD COAGULATION FACTOR | BLOOD CLOTTING |
| | | | | | | | | | VIIA; CHAIN: L; BLOOD | COMPLEX(SERINE |
| | | | | | | | | | COAGULATION FACTOR VIIA; | PROTEASE/COFACTOR/LIGAND), |
| | | | | | | | | | CHAIN: H; SOLUBLE TISSUE | BLOOD COAGULATION, 2 SERINE |
| | | | | | | | | | FACTOR; CHAIN: T; 5L15; CHAIN: | PROTEASE, COMPLEX, CO-FACTOR, |
| | | | | | | | | | 1; | RECEPTOR ENZYME, 3 INHIBITOR, |
| | | | | | | | | | | GLA, EGF, COMPLEX (SERINE 4 |
| | | | | | | | | | | PROTEASE/COFACTOR/LIGAND), |
| | | | | | | | | | | BLOOD CLOTTING |
| 394 | 1fak | L | 437 | 527 | 3e−21 | 0.44 | 0.76 | | BLOOD COAGULATION FACTOR | BLOOD CLOTTING |
| | | | | | | | | | VIIA; CHAIN: L; BLOOD | COMPLEX(SERINE |
| | | | | | | | | | COAGULATION FACTOR VIIA; | PROTEASE/COFACTOR/LIGAND), |
| | | | | | | | | | CHAIN: H; SOLUBLE TISSUE | BLOOD COAGULATION, 2 SERINE |
| | | | | | | | | | FACTOR; CHAIN: T; 5L15; CHAIN: | PROTEASE, COMPLEX, CO-FACTOR, |
| | | | | | | | | | 1; | RECEPTOR ENZYME, 3 INHIBITOR, |
| | | | | | | | | | | GLA, EGF, COMPLEX (SERINE 4 |
| | | | | | | | | | | PROTEASE/COFACTOR/LIGAND), |
| | | | | | | | | | | BLOOD CLOTTING |
| 394 | 1fak | L | 439 | 528 | 1.7e−17 | 0.22 | 0.98 | | BLOOD COAGULATION FACTOR | BLOOD CLOTTING |
| | | | | | | | | | VIIA; CHAIN: L; BLOOD | COMPLEX(SERINE |
| | | | | | | | | | COAGULATION FACTOR VIIA; | PROTEASE/COFACTOR/LIGAND), |
| | | | | | | | | | CHAIN: H; SOLUBLE TISSUE | BLOOD COAGULATION, 2 SERINE |
| | | | | | | | | | FACTOR; CHAIN: T; 5L15; CHAIN: | PROTEASE, COMPLEX, CO-FACTOR, |
| | | | | | | | | | 1; | RECEPTOR ENZYME, 3 INHIBITOR, |
| | | | | | | | | | | GLA, EGF, COMPLEX (SERINE 4 |
| | | | | | | | | | | PROTEASE/COFACTOR/LIGAND), |
| | | | | | | | | | | BLOOD CLOTTING |
| 394 | 1ido | | 1 | 109 | 4.5e−24 | 0.33 | 0.84 | | INTEGRIN; CHAIN: NULL; | CELL ADHESION PROTEIN A- |
| | | | | | | | | | | DOMAIN INTEGRIN, CELL ADHESION |
| | | | | | | | | | | PROTEIN, GLYCOPROTEIN, |
| | | | | | | | | | | EXTRACELLULAR 2 MATRIX, |
| | | | | | | | | | | CYTOSKELETON |
| 394 | 1ido | | 527 | 707 | 4.5e−46 | | | 98.35 | INTEGRIN; CHAIN: NULL; | CELL ADHESION PROTEIN A- |
| | | | | | | | | | | DOMAIN INTEGRIN, CELL ADHESION |
| | | | | | | | | | | PROTEIN, GLYCOPROTEIN, |
| | | | | | | | | | | EXTRACELLULAR 2 MATRIX, |
| | | | | | | | | | | CYTOSKELETON |
| 394 | 1ido | | 529 | 706 | 4.5e−46 | 1.04 | 1.00 | | INTEGRIN; CHAIN: NULL; | CELL ADHESION PROTEIN A- |
| | | | | | | | | | | DOMAIN INTEGRIN, CELL ADHESION |
| | | | | | | | | | | PROTEIN, GLYCOPROTEIN, |
| | | | | | | | | | | EXTRACELLULAR 2 MATRIX, |
| | | | | | | | | | | CYTOSKELETON |
| 394 | 1jia | A | 205 | 321 | 1.5e−19 | 0.01 | −0.02 | | PHOSPHOLIPASE A2; CHAIN: A, B; | PHOSPHOLIPASE PHOSPHOLIPASE |
| | | | | | | | | | | A2, AGKISTRODON HALYS PALLAS |
| | | | | | | | | | | CRYSTAL 2 STRUCTURE |
| 394 | 1lfa | A | 1 | 112 | 1.5e−24 | 0.01 | 0.89 | | CD11A; ILFA 5 CHAIN: A, B; ILFA 6 | CELL ADHESION LFA-1, ALPHA- |
| | | | | | | | | | | L\, BETA-2 INTEGRIN, A-DOMAIN; |
| | | | | | | | | | | ILFA 8 |
| 394 | 1lfa | A | 526 | 711 | 1.5e−53 | | | 93.64 | CD11A; ILFA 5 CHAIN: A, B; ILFA 6 | CELL ADHESION LFA-1, ALPHA- |
| | | | | | | | | | | L\, BETA-2 INTEGRIN, A-DOMAIN; |
| | | | | | | | | | | ILFA 8 |
| 394 | 1lfa | A | 526 | 713 | 1.5e−53 | 1.12 | 1.00 | | CD11A; ILFA 5 CHAIN: A, B; ILFA 6 | CELL ADHESION LFA-1, ALPHA- |
| | | | | | | | | | | L\, BETA-2 INTEGRIN, A-DOMAIN; |
| | | | | | | | | | | ILFA 8 |
| 394 | 1pfx | L | 157 | 301 | 4.5e−30 | −0.01 | 0.07 | | FACTOR IXA; CHAIN: C, L,; D- | COMPLEX (BLOOD |
| | | | | | | | | | PHE-PRO-ARG; CHAIN: 1; | COAGULATION/INHIBITOR) |
| | | | | | | | | | | CHRISTMAS FACTOR; COMPLEX, |
| | | | | | | | | | | INHIBITOR, HEMOPHILIA/EGF, |
| | | | | | | | | | | BLOOD COAGULATION, 2 PLASMA, |
| | | | | | | | | | | SERINE PROTEASE, CALCIUM- |
| | | | | | | | | | | BINDING, HYDROLASE, 3 |
| | | | | | | | | | | GLYCOPROTEIN |
| 394 | 1pfx | L | 197 | 341 | 3e−29 | −0.15 | 0.81 | | FACTOR IXA; CHAIN: C, L,; D- | COMPLEX (BLOOD |
| | | | | | | | | | PHE-PRO-ARG; CHAIN: 1; | COAGULATION/INHIBITOR) |
| | | | | | | | | | | CHRISTMAS FACTOR; COMPLEX, |
| | | | | | | | | | | INHIBITOR, HEMOPHILIA/EGF, |
| | | | | | | | | | | BLOOD COAGULATION, 2 PLASMA, |
| | | | | | | | | | | SERINE PROTEASE, CALCIUM- |
| | | | | | | | | | | BINDING, HYDROLASE, 3 |
| | | | | | | | | | | GLYCOPROTEIN |
| 394 | 1pfx | L | 286 | 423 | 3e−23 | −0.10 | 0.06 | | FACTOR IXA; CHAIN: C, L,; D- | COMPLEX (BLOOD |
| | | | | | | | | | PHE-PRO-ARG; CHAIN: 1; | COAGULATION/INHIBITOR) |
| | | | | | | | | | | CHRISTMAS FACTOR; COMPLEX, |
| | | | | | | | | | | INHIBITOR, HEMOPHILIA/EGF, |
| | | | | | | | | | | BLOOD COAGULATION, 2 PLASMA, |
| | | | | | | | | | | SERINE PROTEASE, CALCIUM- |
| | | | | | | | | | | BINDING, HYDROLASE, 3 |
| | | | | | | | | | | GLYCOPROTEIN |
| 394 | 1pfx | L | 403 | 527 | 6e−25 | 0.06 | 0.41 | | FACTOR IXA; CHAIN: C, L,; D- | COMPLEX (BLOOD |
| | | | | | | | | | PHE-PRO-ARG; CHAIN: 1; | COAGULATION/INHIBITOR) |
| | | | | | | | | | | CHRISTMAS FACTOR; COMPLEX, |
| | | | | | | | | | | INHIBITOR, HEMOPHILIA/EGF, |
| | | | | | | | | | | BLOOD COAGULATION, 2 PLASMA, |
| | | | | | | | | | | SERINE PROTEASE, CALCIUM- |
| | | | | | | | | | | BINDING, HYDROLASE, 3 |
| | | | | | | | | | | GLYCOPROTEIN |
| 394 | 1pfx | L | 440 | 538 | 1.2e−15 | −0.13 | 0.11 | | FACTOR IXA; CHAIN: C, L,; D- | COMPLEX (BLOOD |
| | | | | | | | | | PHE-PRO-ARG; CHAIN: 1; | COAGULATION/INHIBITOR) |
| | | | | | | | | | | CHRISTMAS FACTOR; COMPLEX, |
| | | | | | | | | | | INHIBITOR, HEMOPHILIA/EGF, |
| | | | | | | | | | | BLOOD COAGULATION, 2 PLASMA, |
| | | | | | | | | | | SERINE PROTEASE, CALCIUM- |
| | | | | | | | | | | BINDING, HYDROLASE, 3 |
| | | | | | | | | | | GLYCOPROTEIN |
| 394 | 1qfk | L | 444 | 528 | 1.7e−16 | 0.30 | 0.86 | | COAGULATION FACTOR VIIA | SERINE PROTEASE FVIIA; FVIIA; |
| | | | | | | | | | (LIGHT CHAIN); CHAIN: L; | BLOOD COAGULATION, SERINE |
| | | | | | | | | | COAGULATION FACTOR VIIA | PROTEASE |
| | | | | | | | | | (HEAVY CHAIN); CHAIN: H; | |
| | | | | | | | | | TRIPEPTIDYL INHIBITOR; CHAIN: | |
| | | | | | | | | | C; | |
| 394 | 1xka | L | 444 | 528 | 1.7e−14 | 0.33 | 0.64 | | BLOOD COAGULATION FACTOR | BLOOD COAGULATION FACTOR |
| | | | | | | | | | XA; CHAIN: L, C; | STUART FACTOR; BLOOD |
| | | | | | | | | | | COAGULATION FACTOR, SERINE |
| | | | | | | | | | | PROTEINASE, EPIDERMAL 2 |
| | | | | | | | | | | GROWTH FACTOR LIKE DOMAIN |
| 394 | 1apq | | 120 | 154 | 1.5e−11 | −0.02 | 1.00 | | COMPLEMENT PROTEASE CIR; | COMPLEMENT COMPLEMENT, EGF, |
| | | | | | | | | | CHAIN: NULL; | CALCIUM BINDING, SERINE |
| | | | | | | | | | | PROTEASE |
| 394 | 1aut | L | 80 | 151 | 1.2e−10 | −0.62 | 0.05 | | ACTIVATED PROTEIN C; CHAIN: | COMPLEX (BLOOD |
| | | | | | | | | | C, L; D-PHE-PRO-MAI; CHAIN: P; | COAGULATION/INHIBITOR) |
| | | | | | | | | | | AUTOPROTHROMBIN IIA; |
| | | | | | | | | | | HYDROLASE, SERINE PROTEINASE). |
| | | | | | | | | | | PLASMA CALCIUM BINDING, 2 |
| | | | | | | | | | | GLYCOPROTEIN, COMPLEX (BLOOD |
| | | | | | | | | | | COAGULATION/INHIBITOR) |
| 394 | 1ck4 | A | 5 | 111 | 6e−25 | 0.51 | 1.00 | | INTEGRIN ALPHA-1; CHAIN: A, B; | STRUCTURAL PROTEIN I-DOMAIN, |
| | | | | | | | | | | METAL BINDING, COLLAGEN, |
| | | | | | | | | | | ADHESION |
| 394 | 1ck4 | A | 527 | 709 | 1e−46 | 1.12 | 1.00 | | INTEGRIN ALPHA-1; CHAIN: A, B; | STRUCTURAL PROTEIN I-DOMAIN, |
| | | | | | | | | | | METAL BINDING, COLLAGEN, |
| | | | | | | | | | | ADHESION |
| 394 | 1dan | L | 116 | 205 | 4.5e−20 | −0.44 | 0.65 | | BLOOD COAGULATION FACTOR | BLOOD COAGULATION, SERINE |
| | | | | | | | | | VIIA; CHAIN: L, H; SOLUBLE | PROTEASE, COMPLEX, CO-FACTOR, |
| | | | | | | | | | TISSUE FACTOR; CHAIN: T, U; D- | 2 RECEPTOR ENZYME, INHIBITOR, |
| | | | | | | | | | PHE-PHE-ARG- | GLA, EGF, 3 COMPLEX (SERINE |
| | | | | | | | | | CHLOROMETHYLKETONE | PROTEASE/COFACTOR/LIGAND) |
| | | | | | | | | | (DFFRCMK) WITH CHAIN: C; | |
| 394 | 1dan | L | 124 | 246 | 3e−32 | −0.30 | 0.10 | | BLOOD COAGULATION FACTOR | BLOOD COAGULATION, SERINE |
| | | | | | | | | | VIIA; CHAIN: L, H; SOLUBLE | PROTEASE, COMPLEX, CO-FACTOR, |
| | | | | | | | | | TISSUE FACTOR; CHAIN: T, U; D- | 2 RECEPTOR ENZYME, INHIBITOR, |
| | | | | | | | | | PHE-PHE-ARG- | GLA, EGF, 3 COMPLEX (SERINE |
| | | | | | | | | | CHLOROMETHYLKETONE | PROTEASE/COFACTOR/LIGAND) |
| | | | | | | | | | (DFFRCMK) WITH CHAIN: C; | |
| 394 | 1dan | L | 168 | 287 | 4.5e−31 | -0.15 | 0.55 | | BLOOD COAGULATION FACTOR | BLOOD COAGULATION, SERINE |
| | | | | | | | | | VIIA; CHAIN: L, H: SOLUBLE | PROTEASE, COMPLEX, CO-FACTOR, |
| | | | | | | | | | TISSUE FACTOR; CHAIN: T, U; D- | 2 RECEPTOR ENZYME, INHIBITOR, |
| | | | | | | | | | PHE-PHE-ARG- | GLA, EGF, 3 COMPLEX (SERINE |
| | | | | | | | | | CHLOROMETHYLKETONE | PROTEASE/COFACTOR/LIGAND) |
| | | | | | | | | | (DFFRCMK) WITH CHAIN: C; | |
| 394 | 1dan | L | 207 | 328 | 6e−31 | −0.25 | 0.57 | | BLOOD COAGULATION FACTOR | BLOOD COAGULATION, SERINE |
| | | | | | | | | | VIIA; CHAIN: L, H; SOLUBLE | PROTEASE, COMPLEX, CO-FACTOR, |
| | | | | | | | | | TISSUE FACTOR; CHAIN: T, U; D- | 2 RECEPTOR ENZYME, INHIBITOR, |
| | | | | | | | | | PHE-PHE-ARG- | GLA, EGF, 3 COMPLEX (SERINE |
| | | | | | | | | | CHLOROMETHYLKETONE | PROTEASE/COFACTOR/LIGAND) |
| | | | | | | | | | (DFFRCMK) WITH CHAIN: C; | |
| 394 | 1dan | L | 248 | 369 | 3e−25 | −0.40 | 0.11 | | BLOOD COAGULATION FACTOR | BLOOD COAGULATION, SERINE |
| | | | | | | | | | VIIA; CHAIN: L, H; SOLUBLE | PROTEASE, COMPLEX, CO-FACTOR, |
| | | | | | | | | | TISSUE FACTOR; CHAIN: T, U; D- | 2 RECEPTOR ENZYME, INHIBITOR, |
| | | | | | | | | | PHE-PHE-ARG- | GLA, EGF, 3 COMPLEX (SERINE |
| | | | | | | | | | CHLOROMETHYLKETONE | PROTEASE/COFACTOR/LIGAND) |
| | | | | | | | | | (DFFRCMK) WITH CHAIN: C; | |
| 394 | 1dan | L | 273 | 365 | 1.2e−16 | 0.02 | 0.23 | | BLOOD COAGULATION FACTOR | BLOOD COAGULATION, SERINE |
| | | | | | | | | | VIIA; CHAIN: L, H; SOLUBLE | PROTEASE, COMPLEX, CO-FACTOR, |
| | | | | | | | | | TISSUE FACTOR; CHAIN: T, U; D- | 2 RECEPTOR ENZYME, INHIBITOR, |
| | | | | | | | | | PHE-PHE-ARG- | GLA, EGF, 3 COMPLEX (SERINE |
| | | | | | | | | | CHLOROMETHYLKETONE | PROTEASE/COFACTOR/LIGAND) |
| | | | | | | | | | (DFFRCMK) WITH CHAIN: C; | |
| 394 | 1dan | L | 332 | 451 | 9e−25 | −0.23 | 0.17 | | BLOOD COAGULATION FACTOR | BLOOD COAGULATION, SERINE |
| | | | | | | | | | VIIA; CHAIN: L, H; SOLUBLE | PROTEASE, COMPLEX, CO-FACTOR, |
| | | | | | | | | | TISSUE FACTOR; CHAIN: T, U; D- | 2 RECEPTOR ENZYME, INHIBITOR, |
| | | | | | | | | | PHE-PHE-ARG- | GLA, EGF, 3 COMPLEX (SERINE |
| | | | | | | | | | CHLOROMETHYLKETONE | PROTEASE/COFACTOR/LIGAND) |
| | | | | | | | | | (DFFRCMK) WITH CHAIN: C; | |
| 394 | 1dan | L | 372 | 492 | 9e−26 | −0.12 | 0.05 | | BLOOD COAGULATION FACTOR | BLOOD COAGULATION, SERINE |
| | | | | | | | | | VIIA; CHAIN: L, H; SOLUBLE | PROTEASE, COMPLEX, CO-FACTOR, |
| | | | | | | | | | TISSUE FACTOR; CHAIN: T, U; D- | 2 RECEPTOR ENZYME, INHIBITOR, |
| | | | | | | | | | PHE-PHE-ARG- | GLA, EGF, 3 COMPLEX (SERINE |
| | | | | | | | | | CHLOROMETHYLKETONE | PROTEASE/COFACTOR/LIGAND) |
| | | | | | | | | | (DFFRCMK) WITH CHAIN: C; | |
| 394 | 1dan | L | 412 | 535 | 1.2e−30 | 0.20 | 0.22 | | BLOOD COAGULATION FACTOR | BLOOD COAGULATION, SERINE |
| | | | | | | | | | VIIA; CHAIN: L, H; SOLUBLE | PROTEASE, COMPLEX, CO-FACTOR, |
| | | | | | | | | | TISSUE FACTOR; CHAIN: T, U; D- | 2 RECEPTOR ENZYME, INHIBITOR, |
| | | | | | | | | | PHE-PHE-ARG- | GLA, EGF, 3 COMPLEX (SERINE |
| | | | | | | | | | CHLOROMETHYLKETONE | PROTEASE/COFACTOR/LIGAND) |
| | | | | | | | | | (DFFRCMK) WITH CHAIN: C; | |
| 394 | 1dan | L | 439 | 528 | 1.7e−18 | 0.18 | 0.89 | | BLOOD COAGULATION FACTOR | BLOOD COAGULATION, SERINE |
| | | | | | | | | | VIIA; CHAIN: L, H; SOLUBLE | PROTEASE, COMPLEX, CO-FACTOR, |
| | | | | | | | | | TISSUE FACTOR; CHAIN: T, U; D- | 2 RECEPTOR ENZYME, INHIBITOR, |
| | | | | | | | | | PHE-PHE-ARG- | GLA, EGF, 3 COMPLEX (SERINE |
| | | | | | | | | | CHLOROMETHYLKETONE | PROTEASE/COFACTOR/LIGAND) |
| | | | | | | | | | (DFFRCMK) WITH CHAIN: C; | |
| 394 | 1dqb | A | 315 | 401 | 1.1e−15 | 0.05 | 0.69 | | THROMBOMODULIN; CHAIN: A; | MEMBRANE PROTEIN NMR, |
| | | | | | | | | | | THROMBIN, EGF MODULE, |
| | | | | | | | | | | ANTICOAGULANT, |
| | | | | | | | | | | GLYCOSYLATION |
| 394 | 1dqb | A | 438 | 525 | 7.5e−17 | 0.40 | 0.98 | | THROMBOMODULIN; CHAIN: A; | MEMBRANE PROTEIN NMR, |
| | | | | | | | | | | THROMBIN, EGF MODULE, |
| | | | | | | | | | | ANTICOAGULANT, |
| | | | | | | | | | | GLYCOSYLATION |
| 394 | 1dva | L | 273 | 365 | 1.2e−16 | −0.09 | 0.63 | | DES-GLA FACTOR VIIA (HEAVY | HYDROLASE/HYDROLASE |
| | | | | | | | | | CHAIN); CHAIN: H, 1; DES-GLA | INHIBITOR PROTEIN-PEPTIDE |
| | | | | | | | | | FACTOR VIIA (LIGHT CHAIN); | COMPLEX |
| | | | | | | | | | CHAIN: L, M; (DPN)-PHE-ARG; | |
| | | | | | | | | | CHAIN: C, D; PEPTIDE E-76; | |
| | | | | | | | | | CHAIN: X, Y; | |
| 394 | 1dva | L | 439 | 528 | 1.7e−18 | 0.32 | 0.92 | | DES-GLA FACTOR VIIA (HEAVY | HYDROLASE/HYDROLASE |
| | | | | | | | | | CHAIN); CHAIN: H, I; DES-GLA | INHIBITOR PROTEIN-PEPTIDE |
| | | | | | | | | | FACTOR VIIA (LIGHT CHAIN); | COMPLEX |
| | | | | | | | | | CHAIN: L, M; (DPN)-PHE-ARG; | |
| | | | | | | | | | CHAIN: C, D; PEPTIDE E-76; | |
| | | | | | | | | | CHAIN: X, Y; | |
| 394 | 1dx5 | I | 121 | 233 | 1e−23 | 0.04 | 1.00 | | THROMBIN LIGHT CHAIN; | SERINE PROTEINASE COAGULATION |
| | | | | | | | | | CHAIN: A, B, C, D; THROMBIN | FACTOR II; COAGULATION FACTOR |
| | | | | | | | | | HEAVY CHAIN; CHAIN: M, N, O, P; | II; FETOMODULIN, TM, CD141 |
| | | | | | | | | | THROMBOMODULIN; CHAIN: I, J, | ANTIGEN; EGR-CMK SERINE |
| | | | | | | | | | K, L; THROMBIN INHIBITOR L- | PROTEINASE, EGF-LIKE DOMAINS, |
| | | | | | | | | | GLU-L-GLY-L-ARM; CHAIN: E, F, | ANTICOAGULANT COMPLEX, 2 |
| | | | | | | | | | G, H; | ANTIFIBRINOLYTIC COMPLEX |
| 394 | 1dx5 | I | 153 | 274 | 3e−25 | 0.09 | 0.55 | | THROMBIN LIGHT CHAIN; | SERINE PROTEINASE COAGULATION |
| | | | | | | | | | CHAIN: A, B, C, D; THROMBIN | FACTOR II; COAGULATION FACTOR |
| | | | | | | | | | HEAVY CHAIN; CHAIN: M, N, O, P; | II; FETOMODULIN, TM, CD141 |
| | | | | | | | | | THROMBOMODULIN; CHAIN: I, J, | ANTIGEN; EGR-CMK SERINE |
| | | | | | | | | | K, L; THROMBIN INHIBITOR L- | PROTEINASE, EGF-LIKE DOMAINS, |
| | | | | | | | | | GLU-L-GLY-L-ARM; CHAIN: E, F, | ANTICOAGULANT COMPLEX, 2 |
| | | | | | | | | | G, H; | ANTIFIBRINOLYTIC COMPLEX |
| 394 | 1dx5 | I | 195 | 315 | 4.5e−27 | 0.30 | 1.00 | | THROMBIN LIGHT CHAIN; | SERINE PROTEINASE COAGULATION |
| | | | | | | | | | CHAIN: A, B, C, D; THROMBIN | FACTOR II; COAGULATION FACTOR |
| | | | | | | | | | HEAVY CHAIN; CHAIN: M, N, O, P; | II; FETOMODULIN, TM, CD141 |
| | | | | | | | | | THROMBOMODULIN; CHAIN: I, J, | ANTIGEN; EGR-CMK SERINE |
| | | | | | | | | | K, L; THROMBIN INHIBITOR L- | PROTEINASE, EGF-LIKE DOMAINS, |
| | | | | | | | | | GLU-L-GLY-L-ARM; CHAIN: E, F, | ANTICOAGULANT COMPLEX, 2 |
| | | | | | | | | | G, H; | ANTIFIBRINOLYTIC COMPLEX |
| 394 | 1dx5 | I | 236 | 356 | 1.5e−26 | −0.04 | 1.00 | | THROMBIN LIGHT CHAIN; | SERINE PROTEINASE COAGULATION |
| | | | | | | | | | CHAIN: A, B, C, D; THROMBIN | FACTOR II; COAGULATION FACTOR |
| | | | | | | | | | HEAVY CHAIN; CHAIN: M, N, O, P; | II; FETOMODULIN, TM, CD141 |
| | | | | | | | | | THROMBOMODULIN; CHAIN: I, J, | ANTIGEN; EGR-CMK SERINE |
| | | | | | | | | | K, L; THROMBIN INHIBITOR L- | PROTEINASE, EGF-LIKE DOMAINS, |
| | | | | | | | | | GLU-L-GLY-L-ARM; CHAIN: E, F, | ANTICOAGULANT COMPLEX, 2 |
| | | | | | | | | | G, H; | ANTIFIBRINOLYTIC COMPLEX |
| 394 | 1dx5 | I | 316 | 438 | 3.4e−17 | −0.08 | 0.99 | | THROMBIN LIGHT CHAIN; | SERINE PROTEINASE COAGULATION |
| | | | | | | | | | CHAIN: A, B, C, D; THROMBIN | FACTOR II; COAGULATlON FACTOR |
| | | | | | | | | | HEAVY CHAIN; CHAIN: M, N, O, P: | II; FETOMODULIN, TM, CD141 |
| | | | | | | | | | THROMBOMODULIN; CHAIN: I, J, | ANTIGEN; EGR-CMK SERINE |
| | | | | | | | | | K, L; THROMBIN INHIBITOR L- | PROTEINASE, EGF-LIKE DOMAINS, |
| | | | | | | | | | GLU-L-GLY-L-ARM; CHAIN: E, F, | ANTICOAGULANT COMPLEX, 2 |
| | | | | | | | | | G, H; | ANTIFIBRINOLYTIC COMPLEX |
| 394 | 1dx5 | I | 318 | 438 | 1.5e−22 | 0.19 | 0.93 | | THROMBIN LIGHT CHAIN; | SERINE PROTEINASE COAGULATION |
| | | | | | | | | | CHAIN: A, B, C, D; THROMBIN | FACTOR II; COAGULATION FACTOR |
| | | | | | | | | | HEAVY CHAIN; CHAIN: M, N, O, P; | II; FETOMODULIN, TM, CD141 |
| | | | | | | | | | THROMBOMODULIN; CHAIN: I, J, | ANTIGEN; EGR-CMK SERINE |
| | | | | | | | | | K, L; THROMBIN INHIBITOR L- | PROTEINASE, EGF-LIKE DOMAINS, |
| | | | | | | | | | GLU-L-GLY-L-ARM; CHAIN: E, F, | ANTICOAGULANT COMPLEX, 2 |
| | | | | | | | | | G, H; | ANTIFIBRINOLYTIC COMPLEX |
| 394 | 1dx5 | I | 359 | 479 | 3e−24 | 0.41 | 1.00 | | THROMBIN LIGHT CHAIN; | SERINE PROTEINASE COAGULATION |
| | | | | | | | | | CHAIN: A, B, C, D; THROMBIN | FACTOR II; COAGULATION FACTOR |
| | | | | | | | | | HEAVY CHAIN; CHAIN: M, N, O, P; | II; FETOMODULIN, TM, CD141 |
| | | | | | | | | | THROMBOMODULIN; CHAIN: I, J, | ANTIGEN; EGR-CMK SERINE |
| | | | | | | | | | K, L; THROMBIN INHIBITOR L- | PROTEINASE, EGF-LIKE DOMAINS, |
| | | | | | | | | | GLU-L-GLY-L-ARM; CHAIN: E, F, | ANTICOAGULANT COMPLEX, 2 |
| | | | | | | | | | G, H; | ANTIFIBRINOLYTIC COMPLEX |
| 394 | 1dx5 | I | 401 | 520 | 3e−24 | 0.61 | 1.00 | | THROMBIN LIGHT CHAIN; | SERINE PROTEINASE COAGULATION |
| | | | | | | | | | CHAIN: A, B, C, D; THROMBIN | FACTOR II; COAGULATION FACTOR |
| | | | | | | | | | HEAVY CHAIN; CHAIN: M, N, O, P; | II; FETOMODULIN, TM, CD141 |
| | | | | | | | | | THROMBOMODULIN; CHAIN: I, J, | ANTIGEN; EGR-CMK SERINE |
| | | | | | | | | | K, L; THROMBIN INHIBITOR L- | PROTEINASE, EGF-LIKE DOMAINS, |
| | | | | | | | | | GLU-L-GLY-L-ARM; CHAIN: E, F, | ANTICOAGULANT COMPLEX, 2 |
| | | | | | | | | | G, H; | ANTIFIBRINOLYTIC COMPLEX |
| 394 | 1dx5 | I | 442 | 525 | 1.5e−13 | 0.45 | 0.78 | | THROMBIN LIGHT CHAIN; | SERINE PROTEINASE COAGULATION |
| | | | | | | | | | CHAIN: A, B, C, D; THROMBIN | FACTOR II; COAGULATION FACTOR |
| | | | | | | | | | HEAVY CHAIN; CHAIN: M, N, O, P; | II; FETOMODULIN, TM, CD141 |
| | | | | | | | | | THROMBOMODULIN; CHAIN: I, J, | ANTIGEN; EGR-CMK SERINE |
| | | | | | | | | | K, L; THROMBIN INHIBITOR L- | PROTEINASE, EGF-LIKE DOMAINS, |
| | | | | | | | | | GLU-L-GLY-L-ARM; CHAIN: E, F, | ANTICOAGULANT COMPLEX, 2 |
| | | | | | | | | | G, H; | ANTIFIBRINOLYTIC COMPLEX |
| 394 | 1dx5 | I | 77 | 188 | 3.4e−15 | −0.52 | 0.18 | | THROMBIN LIGHT CHAIN; | SERINE PROTEINASE COAGULATION |
| | | | | | | | | | CHAIN: A, B, C, D; THROMBIN | FACTOR II; COAGULATION FACTOR |
| | | | | | | | | | HEAVY CHAIN; CHAIN: M, N, O, P; | II; FETOMODULIN, TM, CD141 |
| | | | | | | | | | THROMBOMODULIN; CHAIN: I, J, | ANTIGEN; EGR-CMK SERINE |
| | | | | | | | | | K, L; THROMBIN INHIBITOR L- | PROTEINASE, EGF-LIKE DOMAINS, |
| | | | | | | | | | GLU-L-GLY-L-ARM; CHAIN: E, F, | ANTICOAGULANT COMPLEX, 2 |
| | | | | | | | | | G, H; | ANTIFIBRINOLYTIC COMPLEX |
| 394 | 1emn | | 112 | 187 | 3.4e−16 | 0.12 | 0.96 | | FIBRILLIN; CHAIN: NULL; | MATRIX PROTEIN EXTRACELLULAR |
| | | | | | | | | | | MATRIX, CALCIUM-BINDING, |
| | | | | | | | | | | GLYCOPROTEIN, 2 REPEAT, SIGNAL, |
| | | | | | | | | | | MULTIGENE FAMILY, DISEASE |
| | | | | | | | | | | MUTATION, 3 EGF-LIKE DOMAIN, |
| | | | | | | | | | | HUMAN FIBRILLIN-I FRAGMENT, |
| | | | | | | | | | | MATRIX PROTEIN |
| 394 | 1emn | | 235 | 306 | 1.7e−18 | 0.27 | 0.81 | | FIBRILLIN; CHAIN: NULL; | MATRIX PROTEIN EXTRACELLULAR |
| | | | | | | | | | | MATRIX, CALCIUM-BINDING, |
| | | | | | | | | | | GLYCOPROTEIN, 2 REPEAT, SIGNAL, |
| | | | | | | | | | | MULTIGENE FAMILY, DISEASE |
| | | | | | | | | | | MUTATION, 3 EGF-LIKE DOMAIN, |
| | | | | | | | | | | HUMAN FIBRILLIN-I FRAGMENT, |
| | | | | | | | | | | MATRIX PROTEIN |
| 394 | 1emn | | 273 | 347 | 1.7e−17 | 0.10 | 0.88 | | FIBRILLIN; CHAIN: NULL; | MATRIX PROTEIN EXTRACELLULAR |
| | | | | | | | | | | MATRIX, CALCIUM-BINDING, |
| | | | | | | | | | | GLYCOPROTEIN, 2 REPEAT, SIGNAL, |
| | | | | | | | | | | MULTIGENE FAMILY, DISEASE |
| | | | | | | | | | | MUTATION, 3 EGF-LIKE DOMAIN, |
| | | | | | | | | | | HUMAN FIBRILLIN-I FRAGMENT, |
| | | | | | | | | | | MATRIX PROTEIN |
| 394 | 1emn | | 317 | 392 | 1e−17 | −0.34 | 0.80 | | FIBRILLIN; CHAIN: NULL; | MATRIX PROTEIN EXTRACELLULAR |
| | | | | | | | | | | MATRIX, CALClUM-BINDlNG, |
| | | | | | | | | | | GLYCOPROTEIN, 2 REPEAT, SIGNAL, |
| | | | | | | | | | | MULTIGENE FAMILY, DISEASE |
| | | | | | | | | | | MUTATION, 3 EGF-LIKE DOMAIN, |
| | | | | | | | | | | HUMAN FIBRILLIN-I FRAGMENT, |
| | | | | | | | | | | MATRIX PROTEIN |
| 394 | 1emn | | 710 | 779 | 6.8e−15 | 0.06 | −0.19 | | FIBRILLIN; CHAIN: NULL; | MATRIX PROTEIN EXTRACELLULAR |
| | | | | | | | | | | MATRIX, CALCIUM-BINDING, |
| | | | | | | | | | | GLYCOPROTEIN, 2 REPEAT, SIGNAL, |
| | | | | | | | | | | MULTIGENE FAMILY, DISEASE |
| | | | | | | | | | | MUTATION, 3 EGF-LIKE DOMAIN, |
| | | | | | | | | | | HUMAN FIBRILLIN-I FRAGMENT, |
| | | | | | | | | | | MATRIX PROTEIN |
| 394 | 1fak | L | 107 | 164 | 6e−11 | −0.12 | 0.31 | | BLOOD COAGULATION FACTOR | BLOOD CLOTTING |
| | | | | | | | | | VIIA; CHAIN: L; BLOOD | COMPLEX(SERINE |
| | | | | | | | | | COAGULATION FACTOR VIIA; | PROTEASE/COFACTOR/LIGAND), |
| | | | | | | | | | CHAIN: H; SOLUBLE TISSUE | BLOOD COAGULATION, 2 SERINE |
| | | | | | | | | | FACTOR; CHAIN: T; 5L15; CHAIN: | PROTEASE, COMPLEX, CO-FACTOR, |
| | | | | | | | | | I; | RECEPTOR ENZYME, 3 INHIBITOR, |
| | | | | | | | | | | GLA, EGF, COMPLEX (SERINE 4 |
| | | | | | | | | | | PROTEASE/COFACTOR/LIGAND), |
| | | | | | | | | | | BLOOD CLOTTING |
| 394 | 1fak | L | 150 | 246 | 7.5e−22 | −0.23 | 0.10 | | BLOOD COAGULATION FACTOR | BLOOD CLOTTING |
| | | | | | | | | | VIIA; CHAIN: L; BLOOD | COMPLEX(SERINE |
| | | | | | | | | | COAGULATION FACTOR VIIA; | PROTEASE/COFACTOR/LIGAND), |
| | | | | | | | | | CHAIN: H; SOLUBLE TISSUE | BLOOD COAGULATION, 2 SERINE |
| | | | | | | | | | FACTOR; CHAIN: T; 5L15; CHAIN: | PROTEASE, COMPLEX, CO-FACTOR, |
| | | | | | | | | | I; | RECEPTOR ENZYME, 3 INHIBITOR, |
| | | | | | | | | | | GLA, EGF, COMPLEX (SERINE 4 |
| | | | | | | | | | | PROTEASE/COFACTOR/LIGAND), |
| | | | | | | | | | | BLOOD CLOTTING |
| 394 | 1fak | L | 192 | 287 | 1.5e−21 | −0.05 | 0.24 | | BLOOD COAGULATION FACTOR | BLOOD CLOTTING |
| | | | | | | | | | VIIA; CHAIN: L; BLOOD | COMPLEX(SERINE |
| | | | | | | | | | COAGULATION FACTOR VIIA; | PROTEASE/COFACTOR/LIGAND), |
| | | | | | | | | | CHAIN: H; SOLUBLE TISSUE | BLOOD COAGULATION, 2 SERINE |
| | | | | | | | | | FACTOR; CHAIN: T; 5L15; CHAIN: | PROTEASE, COMPLEX, CO-FACTOR, |
| | | | | | | | | | I; | RECEPTOR ENZYME, 3 INHIBITOR, |
| | | | | | | | | | | GLA, EGF, COMPLEX (SERINE 4 |
| | | | | | | | | | | PROTEASE/COFACTOR/LIGAND), |
| | | | | | | | | | | BLOOD CLOTTING |
| 394 | 1fak | L | 232 | 328 | 3e−23 | 0.08 | 0.80 | | BLOOD COAGULATION FACTOR | BLOOD CLOTTING |
| | | | | | | | | | VIIA; CHAIN: L; BLOOD | COMPLEX(SERINE |
| | | | | | | | | | COAGULATION FACTOR VIIA; | PROTEASE/COFACTOR/LIGAND), |
| | | | | | | | | | CHAIN: H; SOLUBLE TISSUE | BLOOD COAGULATION, 2 SERINE |
| | | | | | | | | | FACTOR; CHAIN: T; 5L15; CHAIN: | PROTEASE, COMPLEX, CO-FACTOR, |
| | | | | | | | | | I; | RECEPTOR ENZYME, 3 INHIBITOR, |
| | | | | | | | | | | GLA, EGF, COMPLEX (SERINE 4 |
| | | | | | | | | | | PROTEASE/COFACTOR/LIGAND), |
| | | | | | | | | | | BLOOD CLOTTING |
| 394 | 1fak | L | 273 | 365 | 1.2e−16 | −0.05 | 0.21 | | BLOOD COAGULATION FACTOR | BLOOD CLOTTING |
| | | | | | | | | | VIIA; CHAIN: L; BLOOD | COMPLEX(SERINE |
| | | | | | | | | | COAGULATION FACTOR VIIA; | PROTEASE/COFACTOR/LIGAND), |
| | | | | | | | | | CHAIN: H; SOLUBLE TISSUE | BLOOD COAGULATION, 2 SERINE |
| | | | | | | | | | FACTOR; CHAIN: T; 5L15; CHAIN: | PROTEASE, COMPLEX, CO-FACTOR, |
| | | | | | | | | | I; | RECEPTOR ENZYME, 3 INHIBITOR, |
| | | | | | | | | | | GLA, EGF, COMPLEX (SERINE 4 |
| | | | | | | | | | | PROTEASE/COFACTOR/LIGAND), |
| | | | | | | | | | | BLOOD CLOTTING |
| 394 | 1fak | L | 273 | 369 | 3e−18 | −0.27 | 0.15 | | BLOOD COAGULATION FACTOR | BLOOD CLOTTING |
| | | | | | | | | | VIIA; CHAIN: L; BLOOD | COMPLEX(SERINE |
| | | | | | | | | | COAGULATION FACTOR VIIA; | PROTEASE/COFACTOR/LIGAND), |
| | | | | | | | | | CHAIN: H; SOLUBLE TISSUE | BLOOD COAGULATION, 2 SERINE |
| | | | | | | | | | FACTOR; CHAIN: T; 5L15; CHAIN: | PROTEASE, COMPLEX, CO-FACTOR, |
| | | | | | | | | | I; | RECEPTOR ENZYME, 3 INHIBITOR, |
| | | | | | | | | | | GLA, EGF, COMPLEX (SERINE 4 |
| | | | | | | | | | | PROTEASE/COFACTOR/LIGAND), |
| | | | | | | | | | | BLOOD CLOTTING |
| 394 | 1fak | L | 355 | 451 | 6e−19 | 0.35 | 0.23 | | BLOOD COAGULATION FACTOR | BLOOD CLOTTING |
| | | | | | | | | | VIIA; CHAIN: L; BLOOD | COMPLEX(SERINE |
| | | | | | | | | | COAGULATION FACTOR VIIA; | PROTEASE/COFACTOR/LIGAND), |
| | | | | | | | | | CHAIN: H; SOLUBLE TISSUE | BLOOD COAGULATION, 2 SERINE |
| | | | | | | | | | FACTOR; CHAIN: T; 5L15; CHAIN: | PROTEASE, COMPLEX, CO-FACTOR, |
| | | | | | | | | | I; | RECEPTOR ENZYME, 3 INHIBITOR, |
| | | | | | | | | | | GLA, EGF, COMPLEX (SERINE 4 |
| | | | | | | | | | | PROTEASE/COFACTOR/LIGAND), |
| | | | | | | | | | | BLOOD CLOTTING |
| 394 | 1fak | L | 396 | 492 | 4.5e−19 | 0.09 | 0.10 | | BLOOD COAGULATION FACTOR | BLOOD CLOTTING |
| | | | | | | | | | VIIA; CHAIN: L; BLOOD | COMPLEX(SERINE |
| | | | | | | | | | COAGULATION FACTOR VIIA; | PROTEASE/COFACTOR/LIGAND), |
| | | | | | | | | | CHAIN: H; SOLUBLE TISSUE | BLOOD COAGULATION, 2 SERINE |
| | | | | | | | | | FACTOR; CHAIN: T; 5L15; CHAIN: | PROTEASE, COMPLEX, CO-FACTOR, |
| | | | | | | | | | I; | RECEPTOR ENZYME, 3 INHIBITOR, |
| | | | | | | | | | | GLA, EGF, COMPLEX (SERINE 4 |
| | | | | | | | | | | PROTEASE/COFACTOR/LIGAND), |
| | | | | | | | | | | BLOOD CLOTTING |
| 394 | 1fak | L | 437 | 527 | 3e−21 | 0.44 | 0.76 | | BLOOD COAGULATION FACTOR | BLOOD CLOTTING |
| | | | | | | | | | VIIA; CHAIN: L; BLOOD | COMPLEX(SERINE |
| | | | | | | | | | COAGULATION FACTOR VIIA; | PROTEASE/COFACTOR/LIGAND), |
| | | | | | | | | | CHAIN: H; SOLUBLE TISSUE | BLOOD COAGULATION, 2 SERINE |
| | | | | | | | | | FACTOR; CHAIN: T; 5L15; CHAIN: | PROTEASE, COMPLEX, CO-FACTOR, |
| | | | | | | | | | I; | RECEPTOR ENZYME, 3 INHIBITOR, |
| | | | | | | | | | | GLA, EGF, COMPLEX (SERINE 4 |
| | | | | | | | | | | PROTEASE/COFACTOR/LIGAND), |
| | | | | | | | | | | BLOOD CLOTTING |
| 394 | 1fak | L | 439 | 528 | 1.7e−18 | 0.13 | 0.94 | | BLOOD COAGULATION FACTOR | BLOOD CLOTTING |
| | | | | | | | | | VIIA; CHAIN: L; BLOOD | COMPLEX(SERINE |
| | | | | | | | | | COAGULATION FACTOR VIIA; | PROTEASE/COFACTOR/LIGAND), |
| | | | | | | | | | CHAIN: H; SOLUBLE TISSUE | BLOOD COAGULATION, 2 SERINE |
| | | | | | | | | | FACTOR; CHAIN: T; 5L15; CHAIN: | PROTEASE, COMPLEX, CO-FACTOR, |
| | | | | | | | | | I; | RECEPTOR ENZYME, 3 INHIBITOR, |
| | | | | | | | | | | GLA, EGF, COMPLEX (SERINE 4 |
| | | | | | | | | | | PROTEASE/COFACTOR/LIGAND), |
| | | | | | | | | | | BLOOD CLOTTING |
| 394 | 1ido | | 1 | 109 | 4.5e−24 | 0.33 | 0.84 | | INTEGRIN; CHAIN: NULL; | CELL ADHESION PROTEIN A- |
| | | | | | | | | | | DOMAIN INTEGRIN, CELL ADHESION |
| | | | | | | | | | | PROTEIN, GLYCOPROTEIN, |
| | | | | | | | | | | EXTRACELLULAR 2 MATRIX, |
| | | | | | | | | | | CYTOSKELETON |
| 394 | 1ido | | 527 | 707 | 4.5e−46 | | | 98.35 | INTEGRIN; CHAIN: NULL; | CELL ADHESION PROTEIN A- |
| | | | | | | | | | | DOMAIN INTEGRIN, CELL ADHESION |
| | | | | | | | | | | PROTEIN, GLYCOPROTEIN, |
| | | | | | | | | | | EXTRACELLULAR 2 MATRIX, |
| | | | | | | | | | | CYTOSKELETON |
| 394 | 1ido | | 529 | 706 | 4.5e−46 | 1.04 | 1.00 | | INTEGRIN; CHAIN: NULL; | CELL ADHESION PROTEIN A- |
| | | | | | | | | | | DOMAIN INTEGRIN, CELL ADHESION |
| | | | | | | | | | | PROTEIN, GLYCOPROTEIN, |
| | | | | | | | | | | EXTRACELLULAR 2 MATRIX, |
| | | | | | | | | | | CYTOSKELETON |
| 394 | 1jia | A | 205 | 321 | 1.5e−19 | 0.01 | −0.02 | | PHOSPHOLIPASE A2; CHAIN: A, B; | PHOSPHOLIPASE PHOSPHOLIPASE |
| | | | | | | | | | | A2, AGKISTRODON HALYS PALLAS |
| | | | | | | | | | | CRYSTAL 2 STRUCTURE |
| 394 | 1lfa | A | 1 | 112 | 1.5e−24 | 0.01 | 0.89 | | CDIIA; ILFA 5 CHAIN: A, B; ILFA 6 | CELL ADHESION LFA-I, ALPHA- |
| | | | | | | | | | | L\,BETA-2 INTEGRIN, A-DOMAIN; |
| | | | | | | | | | | ILFA 8 |
| 394 | 1lfa | A | 526 | 711 | 1.5e−53 | | | 93.74 | CDIIA; ILFA 5 CHAIN: A, B; ILFA 6 | CELL ADHESION LFA-I, ALPHA- |
| | | | | | | | | | | L\,BETA-2 INTEGRIN, A-DOMAIN; |
| | | | | | | | | | | ILFA 8 |
| 394 | 1lfa | A | 526 | 713 | 1.5e−53 | 1.12 | 1.00 | | CDIIA; ILFA 5 CHAIN: A, B; ILFA 6 | CELL ADHESION LFA-I, ALPHA- |
| | | | | | | | | | | L\,BETA-2 INTEGRIN, A-DOMAIN; |
| | | | | | | | | | | ILFA 8 |
| 394 | 1pfx | L | 157 | 301 | 4.5e−30 | −0.01 | 0.07 | | FACTOR IXA; CHAIN: C, L,; D- | COMPLEX (BLOOD |
| | | | | | | | | | PHE-PRO-ARG; CHAIN: I; | COAGULATION/INHIBITOR) |
| | | | | | | | | | | CHRISTMAS FACTOR; COMPLEX, |
| | | | | | | | | | | INHIBITOR, HEMOPHILIA/EGF, |
| | | | | | | | | | | BLOOD COAGULATION, 2 PLASMA, |
| | | | | | | | | | | SERINE PROTEASE, CALCIUM- |
| | | | | | | | | | | BINDING, HYDROLASE, 3 |
| | | | | | | | | | | GLYCOPROTEIN |
| 394 | 1pfx | L | 197 | 341 | 3e−29 | −0.15 | 0.81 | | FACTOR IXA; CHAIN: C, L,; D- | COMPLEX (BLOOD |
| | | | | | | | | | PHE-PRO-ARG; CHAIN: I; | COAGULATION/INHIBITOR) |
| | | | | | | | | | | CHRISTMAS FACTOR; COMPLEX, |
| | | | | | | | | | | INHIBITOR, HEMOPHILIA/EGF, |
| | | | | | | | | | | BLOOD COAGULATION, 2 PLASMA, |
| | | | | | | | | | | SERINE PROTEASE, CALCIUM- |
| | | | | | | | | | | BINDING, HYDROLASE, 3 |
| | | | | | | | | | | GLYCOPROTEIN |
| 394 | 1pfx | L | 286 | 423 | 3e−23 | −0.10 | 0.06 | | FACTOR IXA; CHAIN: C, L,; D- | COMPLEX (BLOOD |
| | | | | | | | | | PHE-PRO-ARG; CHAIN: I; | COAGULATION/INHIBITOR) |
| | | | | | | | | | | CHRISTMAS FACTOR; COMPLEX, |
| | | | | | | | | | | INHIBITOR, HEMOPHILIA/EGF, |
| | | | | | | | | | | BLOOD COAGULATION, 2 PLASMA, |
| | | | | | | | | | | SERINE PROTEASE, CALCIUM- |
| | | | | | | | | | | BINDING, HYDROLASE, 3 |
| | | | | | | | | | | GLYCOPROTEIN |
| 394 | 1pfx | L | 403 | 527 | 6e−25 | 0.06 | 0.41 | | FACTOR IXA; CHAIN: C, L,; D- | COMPLEX (BLOOD |
| | | | | | | | | | PHE-PRO-ARG; CHAIN: I; | COAGULATION/INHIBITOR) |
| | | | | | | | | | | CHRISTMAS FACTOR; COMPLEX, |
| | | | | | | | | | | INHIBITOR, HEMOPHILIA/EGF, |
| | | | | | | | | | | BLOOD COAGULATION, 2 PLASMA, |
| | | | | | | | | | | SERINE PROTEASE, CALCIUM- |
| | | | | | | | | | | BINDING, HYDROLASE, 3 |
| | | | | | | | | | | GLYCOPROTEIN |
| 394 | 1pfx | L | 440 | 536 | 8.5e−15 | 0.30 | 0.94 | | FACTOR IXA; CHAIN: C, L,; D- | COMPLEX (BLOOD |
| | | | | | | | | | PHE-PRO-ARG; CHAIN: I; | COAGULATION/INHIBITOR) |
| | | | | | | | | | | CHRISTMAS FACTOR; COMPLEX, |
| | | | | | | | | | | INHIBITOR, HEMOPHILIA/EGF, |
| | | | | | | | | | | BLOOD COAGULATION, 2 PLASMA, |
| | | | | | | | | | | SERINE PROTEASE, CALCIUM- |
| | | | | | | | | | | BINDING, HYDROLASE, 3 |
| | | | | | | | | | | GLYCOPROTEIN |
| 394 | 1qfk | L | 444 | 528 | 3.4e−17 | 0.06 | 0.92 | | COAGULATION FACTOR VIIA | SERINE PROTEASE FVIIA; FVIIA; |
| | | | | | | | | | (LIGHT CHAIN); CHAIN: L; | BLOOD COAGULATION, SERINE |
| | | | | | | | | | COAGULATION FACTOR VIIA | PROTEASE |
| | | | | | | | | | (HEAVY CHAIN); CHAIN: H; | |
| | | | | | | | | | TRIPEPTIDYL INHIBITOR; CHAIN: | |
| | | | | | | | | | C; | |
| 394 | 1xka | L | 444 | 528 | 1.5e−14 | 0.33 | 0.64 | | BLOOD COAGULATION FACTOR | BLOOD COAGULATION FACTOR |
| | | | | | | | | | XA; CHAIN: L, C; | STUART FACTOR; BLOOD |
| | | | | | | | | | | COAGULATION FACTOR, SERINE |
| | | | | | | | | | | PROTEINASE, EPIDERMAL 2 |
| | | | | | | | | | | GROWTH FACTOR LIKE DOMAIN |
| 399 | 1aip | A | 183 | 403 | 3.4e−67 | −0.15 | 0.17 | | ELONGATION FACTOR TU; | COMPLEX OF TWO ELONGATION |
| | | | | | | | | | CHAIN: A, B, E, F; ELONGATION | FACTORS EF-TU; EF-TS; |
| | | | | | | | | | FACTOR TS; CHAIN: C, D, G, H; | ELONGATION FACTOR, |
| | | | | | | | | | | NUCLEOTIDE EXCHANGE, GTP- |
| | | | | | | | | | | BINDING, 2 COMPLEX OF TWO |
| | | | | | | | | | | ELONGATION FACTORS |
| 399 | 1efc | A | 183 | 403 | 3.4e−71 | −0.23 | 0.01 | | ELONGATION FACTOR; CHAIN: | RNA BINDING PROTEIN EFTU; |
| | | | | | | | | | A, B; | TRANSPORT AND PROTECTION |
| | | | | | | | | | | PROTEIN, RNA BINDING PROTEIN |
| 399 | 1efu | A | 183 | 403 | 5.1e−65 | −0.21 | 0.09 | | ELONGATION FACTOR TU; | COMPLEX (TWO ELONGATION |
| | | | | | | | | | CHAIN: A, C; ELONGATION | FACTORS) ELONGATION FACTOR |
| | | | | | | | | | FACTOR TS; CHAIN: B, D; | FOR TRANSFER, HEAT UNSTABLE, |
| | | | | | | | | | | ELONGATION FACTOR FOR |
| | | | | | | | | | | TRANSFER, HEAT STABLE, |
| | | | | | | | | | | ELONGATION FACTOR, COMPLEX |
| | | | | | | | | | | (TWO ELONGATION FACTORS) |
| 399 | 1ega | A | 184 | 388 | 6.8e−38 | −0.11 | 0.13 | | GTP-BINDING PROTEIN ERA; | HYDROLASE ERA, GTPASE, RNA- |
| | | | | | | | | | CHAIN: A, B; | BINDING, RAS-LIKE, HYDROLASE |
| 399 | 1etu | | 183 | 343 | 5.1e−47 | 0.07 | 0.41 | | TRANSPORT AND PROTECTION | |
| | | | | | | | | | PROTEIN ELONGATION FACTOR | |
| | | | | | | | | | TU (DOMAIN I) —*GUANOSINE | |
| | | | | | | | | | DIPHOSPHATE IETU 4 COMPLEX | |
| | | | | | | | | | IETU 5 | |
| 399 | 1exm | A | 183 | 403 | 1.7e−73 | −0.28 | 0.10 | | ELONGATION FACTOR TU (EF- | TRANSLATION EF-TU; GTPASE, |
| | | | | | | | | | TU); CHAIN: A; | MOLECULAR SWITCH, TRNA, |
| | | | | | | | | | | RIBOSOME, Q-BETA REPLICASE, 2 |
| | | | | | | | | | | CHAPERONE, DISULFIDE |
| | | | | | | | | | | ISOMERASE |
| 399 | 1f60 | A | 183 | 400 | 1e−73 | −0.34 | 0.07 | | ELONGATION FACTOR EEFIA; | TRANSLATION PROTEIN-PROTEIN |
| | | | | | | | | | CHAIN: A; ELONGATION FACTOR | COMPLEX |
| | | | | | | | | | EEFIBA; CHAIN: B; | |
| 399 | 1kao | | 184 | 342 | 1.7e−05 | −0.06 | 0.13 | | RAP2A; CHAIN: NULL; | GTP-BINDING PROTEIN GTP- |
| | | | | | | | | | | BINDING PROTEIN, SMALL G |
| | | | | | | | | | | PROTEIN, RAP2, GDP, RAS |
| 402 | 1alh | A | 167 | 239 | 1.5e−20 | −0.09 | 0.27 | | QGSR ZINC FINGER PEPTIDE; | COMPLEX (ZINC FINGER/DNA) |
| | | | | | | | | | CHAIN: A; DUPLEX | COMPLEX (ZINC FINGER/DNA), ZINC |
| | | | | | | | | | OLIGONUCLEOTIDE BINDING | FINGER, DNA-BINDING PROTEIN |
| | | | | | | | | | SITE; CHAIN: B, C; | |
| 402 | 1alh | A | 186 | 271 | 1.5e−20 | | | 58.92 | QGSR ZINC FINGER PEPTIDE; | COMPLEX (ZINC FINGER/DNA) |
| | | | | | | | | | CHAIN: A; DUPLEX | COMPLEX (ZINC FINGER/DNA), ZINC |
| | | | | | | | | | OLIGONUCLEOTIDE BINDING | FINGER, DNA-BINDING PROTEIN |
| | | | | | | | | | SITE; CHAIN: B, C; | |
| 402 | 1alh | A | 243 | 310 | 3.4e−24 | 0.08 | 1.00 | | QGSR ZINC FINGER PEPTIDE; | COMPLEX (ZINC FINGER/DNA) |
| | | | | | | | | | CHAIN: A; DUPLEX | COMPLEX (ZINC FINGER/DNA), ZINC |
| | | | | | | | | | OLIGONUCLEOTIDE BINDING | FINGER, DNA-BINDING PROTEIN |
| | | | | | | | | | SITE; CHAIN: B, C; | |
| 402 | 1mey | C | 166 | 239 | 5.1e−37 | −0.10 | 0.30 | | DNA; CHAIN: A, B, D, E; | COMPLEX (ZINC FINGER/DNA) ZINC |
| | | | | | | | | | CONSENSUS ZINC FINGER | FINGER, PROTEIN-DNA |
| | | | | | | | | | PROTEIN; CHAIN: C, F, G; | INTERACTION, PROTEIN DESIGN, 2 |
| | | | | | | | | | | CRYSTAL STRUCTURE, COMPLEX |
| | | | | | | | | | | (ZINC FINGER/DNA) |
| 402 | 1mey | C | 185 | 269 | 1.4e−44 | −0.23 | 1.00 | | DNA; CHAIN: A, B, D, E; | COMPLEX (ZINC FINGER/DNA) ZINC |
| | | | | | | | | | CONSENSUS ZINC FINGER | FINGER, PROTEIN-DNA |
| | | | | | | | | | PROTEIN; CHAIN: C, F, G; | INTERACTION, PROTEIN DESIGN, 2 |
| | | | | | | | | | | CRYSTAL STRUCTURE, COMPLEX |
| | | | | | | | | | | (ZINC FINGER/DNA) |
| 402 | 1mey | C | 214 | 300 | 1.4e−44 | | | 67.85 | DNA; CHAIN: A, B, D, E; | COMPLEX (ZINC FINGER/DNA) ZINC |
| | | | | | | | | | CONSENSUS ZINC FINGER | FINGER, PROTEIN-DNA |
| | | | | | | | | | PROTEIN; CHAIN: C, F, G; | INTERACTION, PROTEIN DESIGN, 2 |
| | | | | | | | | | | CRYSTAL STRUCTURE, COMPLEX |
| | | | | | | | | | | (ZINC FINGER/DNA) |
| 402 | 1mey | C | 242 | 310 | 1e−37 | −0.09 | 1.00 | | DNA; CHAIN: A, B, D, E; | COMPLEX (ZINC FINGER/DNA) ZINC |
| | | | | | | | | | CONSENSUS ZINC FINGER | FINGER, PROTEIN-DNA |
| | | | | | | | | | PROTEIN; CHAIN: C, F, G; | INTERACTION, PROTEIN DESIGN, 2 |
| | | | | | | | | | | CRYSTAL STRUCTURE, COMPLEX |
| | | | | | | | | | | (ZINC FINGER/DNA) |
| 402 | 1spl | | 273 | 301 | 0.00015 | −0.17 | 0.99 | | SPIF3; CHAIN: NULL; | ZINC FINGER TRANSCRIPTION |
| | | | | | | | | | | FACTOR SPI; ZINC FINGER, |
| | | | | | | | | | | TRANSCRIPTION ACTIVATION, SPI |
| 402 | 1tf3 | A | 214 | 303 | 3.4e−20 | | | 67.04 | TRANSCRIPTION FACTOR IIIA; | COMPLEX (TRANSCRIPTION |
| | | | | | | | | | CHAIN: A; 5S RNA GENE; CHAIN: | REGULATION/DNA) TFIIIA; 5S GENE; |
| | | | | | | | | | E, F; | NMR, TFIIIA, PROTEIN, DNA, |
| | | | | | | | | | | TRANSCRIPTION FACTOR, 5S RNA 2 |
| | | | | | | | | | | GENE, DNA BINDING PROTEIN, ZINC |
| | | | | | | | | | | FINGER, COMPLEX 3 |
| | | | | | | | | | | (TRANSCRIPTION |
| | | | | | | | | | | REGULATION/DNA) |
| 402 | 1tf3 | A | 243 | 307 | 3.4e−20 | 0.06 | 0.48 | | TRANSCRIPTION FACTOR IIIA; | COMPLEX (TRANSCRIPTION |
| | | | | | | | | | CHAIN: A; 5S RNA GENE; CHAIN: | REGULATION/DNA) TFIIIA; 5S GENE; |
| | | | | | | | | | E, F; | NMR, TFIIIA, PROTEIN, DNA, |
| | | | | | | | | | | TRANSCRIPTION FACTOR, 5S RNA 2 |
| | | | | | | | | | | GENE, DNA BINDING PROTEIN, ZINC |
| | | | | | | | | | | FINGER, COMPLEX 3 |
| | | | | | | | | | | (TRANSCRIPTION |
| | | | | | | | | | | REGULATION/DNA) |
| 402 | 1tf6 | A | 108 | 295 | 5.1e−39 | | | 78.75 | TFIIIA; CHAIN: A, D; 5S | COMPLEX (TRANSCRIPTION |
| | | | | | | | | | RIBOSOMAL RNA GENE; CHAIN: | REGULATION/DNA) COMPLEX |
| | | | | | | | | | B, C, E, F; | (TRANSCRIPTION |
| | | | | | | | | | | REGULATION/DNA), RNA |
| | | | | | | | | | | POLYMERASE III, 2 TRANSCRIPTION |
| | | | | | | | | | | INITIATION, ZINC FINGER PROTEIN |
| 402 | 1tf6 | A | 167 | 306 | 5.1e−39 | −0.11 | 0.39 | | TFIIIA; CHAIN: A, D; 5S | COMPLEX (TRANSCRIPTION |
| | | | | | | | | | RIBOSOMAL RNA GENE; CHAIN: | REGULATION/DNA) COMPLEX |
| | | | | | | | | | B, C, E, F; | (TRANSCRIPTION |
| | | | | | | | | | | REGULATION/DNA), RNA |
| | | | | | | | | | | POLYMERASE III, 2 TRANSCRIPTION |
| | | | | | | | | | | INITIATION, ZINC FINGER PROTEIN |
| 402 | 1ubd | C | 167 | 269 | 1.7e−33 | −0.23 | 0.31 | | YY1; CHAIN: C; ADENO- | COMPLEX (TRANSCRIPTION |
| | | | | | | | | | ASSOCIATED VIRUS P5 | REGULATION/DNA) YING-YANG 1; |
| | | | | | | | | | INITIATOR ELEMENT DNA; | TRANSCRIPTION INITIATION, |
| | | | | | | | | | CHAIN: A, B; | INITIATOR ELEMENT, YY1, ZINC 2 |
| | | | | | | | | | | FINGER PROTEIN, DNA-PROTEIN |
| | | | | | | | | | | RECOGNITION, 3 COMPLEX |
| | | | | | | | | | | (TRANSCRIPTION |
| | | | | | | | | | | REGULATION/DNA) |
| 402 | 1ubd | C | 187 | 300 | 5.1e−49 | | | 165.14 | YY1; CHAIN: C; ADENO- | COMPLEX (TRANSCRIPTION |
| | | | | | | | | | ASSOCIATED VIRUS P5 | REGULATION/DNA) YING-YANG 1; |
| | | | | | | | | | INITIATOR ELEMENT DNA; | TRANSCRIPTION INITIATION, |
| | | | | | | | | | CHAIN: A, B; | INITIATOR ELEMENT, YY1, ZINC 2 |
| | | | | | | | | | | FINGER PROTEIN, DNA-PROTEIN |
| | | | | | | | | | | RECOGNITION, 3 COMPLEX |
| | | | | | | | | | | (TRANSCRIPTION |
| | | | | | | | | | | REGULATION/DNA) |
| 402 | 1ubd | C | 190 | 299 | 5.1e−49 | 0.13 | 1.00 | | YY1; CHAIN: C; ADENO- | COMPLEX (TRANSCRIPTION |
| | | | | | | | | | ASSOCIATED VIRUS P5 | REGULATION/DNA) YING-YANG 1; |
| | | | | | | | | | INITIATOR ELEMENT DNA; | TRANSCRIPTION INITIATION, |
| | | | | | | | | | CHAIN: A, B; | INITIATOR ELEMENT, YY1, ZINC 2 |
| | | | | | | | | | | FINGER PROTEIN, DNA-PROTEIN |
| | | | | | | | | | | RECOGNITION, 3 COMPLEX |
| | | | | | | | | | | (TRANSCRIPTION |
| | | | | | | | | | | REGULATION/DNA) |
| 402 | 1ubd | C | 222 | 310 | 1.7e−30 | −0.28 | 0.98 | | YY1; CHAIN: C; ADENO- | COMPLEX (TRANSCRIPTION |
| | | | | | | | | | ASSOCIATED VIRUS P5 | REGULATION/DNA) YING-YANG 1; |
| | | | | | | | | | INITIATOR ELEMENT DNA; | TRANSCRIPTION INITIATION, |
| | | | | | | | | | CHAIN: A, B; | INITIATOR ELEMENT, YY1, ZINC 2 |
| | | | | | | | | | | FINGER PROTEIN, DNA-PROTEIN |
| | | | | | | | | | | RECOGNITION, 3 COMPLEX |
| | | | | | | | | | | (TRANSCRIPTION |
| | | | | | | | | | | REGULATION/DNA) |
| 402 | 2gli | A | 149 | 301 | 8.5e−38 | | | 82.64 | ZINC FINGER PROTEIN GLI1; | COMPLEX (DNA-BINDING |
| | | | | | | | | | CHAIN: A; DNA; CHAIN: C, D; | PROTEIN/DNA) FIVE-FINGER GLI; |
| | | | | | | | | | | GLI, ZINC FINGER, COMPLEX (DNA- |
| | | | | | | | | | | BINDING PROTEIN/DNA) |
| 402 | 2gli | A | 167 | 298 | 8.5e−38 | −0.15 | 0.94 | | ZINC FINGER PROTEIN GLI1; | COMPLEX (DNA-BINDING |
| | | | | | | | | | CHAIN: A; DNA; CHAIN: C, D; | PROTEIN/DNA) FIVE-FINGER GLI; |
| | | | | | | | | | | GL1, ZINC FINGER, COMPLEX (DNA- |
| | | | | | | | | | | BINDING PROTEIN/DNA) |
| 404 | 1fjg | Q | 71 | 147 | 1.5e−28 | 0.12 | 0.99 | | 16S RIBOSOMAL RNA; CHAIN: A; | RIBOSOME 30S RIBOSOMAL |
| | | | | | | | | | FRAGMENT OF MESSENGER | SUBUNIT, RIBOSOME, ANTIBIOTIC, |
| | | | | | | | | | RNA; CHAIN: X; 30S RIBOSOMAL | STREPTOMYCIN, 2 SPECTINOMYCIN, |
| | | | | | | | | | PROTEIN S2; CHAIN: B; 30S | PAROMOMYCIN |
| | | | | | | | | | RIBOSOMAL PROTEIN S3; CHAIN: | |
| | | | | | | | | | C; 30S RIBOSOMAL PROTEIN S4; | |
| | | | | | | | | | CHAIN: D; 30S RIBOSOMAL | |
| | | | | | | | | | PROTEIN S5; CHAIN: E; 30S | |
| | | | | | | | | | RIBOSOMAL PROTEIN S6; CHAIN: | |
| | | | | | | | | | F; 30S RIBOSOMAL PROTEIN S7; | |
| | | | | | | | | | CHAIN: G; 30S RIBOSOMAL | |
| | | | | | | | | | PROTEIN S8; CHAIN: H; 30S | |
| | | | | | | | | | RIBOSOMAL PROTEIN S9; CHAIN: | |
| | | | | | | | | | I; 30S RIBOSOMAL PROTEIN S10; | |
| | | | | | | | | | CHAIN: J; 30S RIBOSOMAL | |
| | | | | | | | | | PROTEIN S11; CHAIN: K; 30S | |
| | | | | | | | | | RIBOSOMAL PROTEIN S12; | |
| | | | | | | | | | CHAIN: L; 30S RIBOSOMAL | |
| | | | | | | | | | PROTEIN S13; CHAIN: M; 30S | |
| | | | | | | | | | RIBOSOMAL PROTEIN S14; | |
| | | | | | | | | | CHAIN: N; 30S RIBOSOMAL | |
| | | | | | | | | | PROTEIN S15; CHAIN: O; 30S | |
| | | | | | | | | | RIBOSOMAL PROTEIN S16; | |
| | | | | | | | | | CHAIN: P; 30S RIBOSOMAL | |
| | | | | | | | | | PROTEIN S17; CHAIN: Q; 30S | |
| | | | | | | | | | RIBOSOMAL PROTEIN S18; | |
| | | | | | | | | | CHAIN: R; 30S RIBOSOMAL | |
| | | | | | | | | | PROTEIN S19; CHAIN: S; 30S | |
| | | | | | | | | | RIBOSOMAL PROTEIN S20; | |
| | | | | | | | | | CHAIN: T; 30S RIBOSOMAL | |
| | | | | | | | | | PROTEIN THX; CHAIN: V | |
| 404 | 1qd7 | I | 69 | 151 | 3.4e−32 | −0.76 | 0.00 | | CENTRAL FRAGMENT OF 16S | RIBOSOME 30S RIBOSOMAL |
| | | | | | | | | | RNA; CHAIN: A; END FRAGMENT | SUBUNIT, LOW RESOLUTION MODEL |
| | | | | | | | | | OF 16 S RNA; CHAIN: B; S4 | |
| | | | | | | | | | RIBOSOMAL PROTEIN; CHAIN: C; | |
| | | | | | | | | | S5 RIBOSOMAL PROTEIN; CHAIN: | |
| | | | | | | | | | D; S6 RIBOSOMAL PROTEIN; | |
| | | | | | | | | | CHAIN: E; S7 RIBOSOMAL | |
| | | | | | | | | | PROTEIN; CHAIN: F; S8 | |
| | | | | | | | | | RIBOSOMAL PROTEIN; CHAIN: G; | |
| | | | | | | | | | S15 RIBOSOMAL PROTEIN; | |
| | | | | | | | | | CHAIN: H; S17 RIBOSOMAL | |
| | | | | | | | | | PROTEIN; CHAIN: I; S20 | |
| | | | | | | | | | RIBOSOMAL PROTEIN; CHAIN: J | |
| 406 | 1aps | | 2 | 98 | 1.4e−33 | 0.96 | 1.00 | | HYDROLASE(ACTING ON ACID | |
| | | | | | | | | | ANHYDRIDES) | |
| | | | | | | | | | ACYLPHOSPHATASE (E.C.3.6.1.7) | |
| | | | | | | | | | (NMR, 5 STRUCTURES) 1APS 3 | |
| 406 | 1aps | | 2 | 99 | 1.4e−33 | | | 102.47 | HYDROLASE(ACTING ON ACID | |
| | | | | | | | | | ANHYDRIDES) | |
| | | | | | | | | | ACYLPHOSPHATASE (E.C.3.6.1.7) | |
| | | | | | | | | | (NMR, 5 STRUCTURES) 1APS 3 | |
| 406 | 2acy | | 2 | 99 | 3.4e−33 | 0.79 | 1.00 | | ACYLPHOSPHATASE; CHAIN: | ACYLPHOSPHATASE ACP; |
| | | | | | | | | | NULL; | ACYLPHOSPHATASE, PHOSPHORIC |
| | | | | | | | | | | MONOESTER HYDROLASE |
| 406 | 2acy | | 2 | 99 | 3.4e−33 | | | 139.55 | ACYLPHOSPHATASE; CHAIN: | ACYLPHOSPHATASE ACP; |
| | | | | | | | | | NULL; | ACYLPHOSPHATASE, PHOSPHORIC |
| | | | | | | | | | | MONOESTER HYDROLASE |
| 407 | 1a17 | | 622 | 730 | 1.5e−11 | 0.15 | 0.77 | | SERINE/THREONINE PROTEIN | HYDROLASE TETRATRICOPEPTIDE, |
| | | | | | | | | | PHOSPHATASE 5; CHAIN: NULL; | TRP; HYDROLASE, PHOSPHATASE, |
| | | | | | | | | | | PROTEIN-PROTEIN INTERACTIONS, |
| | | | | | | | | | | TPR, 2 SUPER-HELIX, X-RAY |
| | | | | | | | | | | STRUCTURE |
| 407 | 1a17 | | 661 | 728 | 5.1e−06 | 0.09 | 0.98 | | SERINE/THREONINE PROTEIN | HYDROLASE TETRATRICOPEPTIDE, |
| | | | | | | | | | PHOSPHATASE 5; CHAIN: NULL; | TRP; HYDROLASE, PHOSPHATASE, |
| | | | | | | | | | | PROTEIN-PROTEIN INTERACTIONS, |
| | | | | | | | | | | TPR, 2 SUPER-HELIX, X-RAY |
| | | | | | | | | | | STRUCTURE |
| 407 | 1elr | A | 263 | 376 | 1.2e−07 | −0.04 | 0.12 | | TPR2A-DOMAIN OF HOP; CHAIN: | CHAPERONE HOP, TPR-DOMAIN, |
| | | | | | | | | | A; HSP90-PEPTIDE MEEVD; | PEPTIDE-COMPLEX, HELICAL |
| | | | | | | | | | CHAIN: B; | REPEAT, HSP90, 2 PROTEIN BINDING |
| 407 | 1elr | A | 620 | 727 | 9e−10 | −0.47 | 0.00 | | TPR2A-DOMAIN OF HOP; CHAIN: | CHAPERONE HOP, TPR-DOMAIN, |
| | | | | | | | | | A; HSP90-PEPTIDE MEEVD; | PEPTIDE-COMPLEX, HELICAL |
| | | | | | | | | | CHAIN: B; | REPEAT, HSP90, 2 PROTEIN BINDING |
| 407 | 1elr | A | 660 | 733 | 6.8e−05 | −0.38 | 0.40 | | TPR2A-DOMAIN OF HOP; CHAIN: | CHAPERONE HOP, TPR-DOMAIN, |
| | | | | | | | | | A; HSP90-PEPTIDE MEEVD; | PEPTIDE-COMPLEX, HELICAL |
| | | | | | | | | | CHAIN: B; | REPEAT, HSP90, 2 PROTEIN BINDING |
| 407 | 1elw | A | 658 | 758 | 1.2e−07 | −0.23 | 0.21 | | TPR1-DOMAIN OF HOP; CHAIN: A, | CHAPERONE HOP, TPR-DOMAIN, |
| | | | | | | | | | B; HSC70-PEPTIDE; CHAIN: C, D; | PEPTIDE-COMPLEX, HELICAL |
| | | | | | | | | | | REPEAT, HSC70, 2 HSP70, PROTEIN |
| | | | | | | | | | | BINDING |
| 407 | 1fch | A | 192 | 386 | 6e−12 | −0.22 | 0.24 | | PEROXISOMAL TARGETING | SIGNALING PROTEIN PEROXISMORE |
| | | | | | | | | | SIGNAL 1 RECEPTOR; CHAIN: A, | RECEPTOR 1, PTS1-BP, PEROXIN-5, |
| | | | | | | | | | B; PTS1-CONTAINING PEPTIDE: | PTS1 PROTEIN-PEPTIDE COMPLEX, |
| | | | | | | | | | CHAIN: C, D; | TETRATRICOPEPTIDE REPEAT, TPR, |
| | | | | | | | | | | 2 HELICAL REPEAT |
| 407 | 1fch | A | 510 | 749 | 5.1e−12 | −0.31 | 0.09 | | PEROXISOMAL TARGETING | SIGNALING PROTEIN PEROXISMORE |
| | | | | | | | | | SIGNAL 1 RECEPTOR; CHAIN: A, | RECEPTOR 1, PTS1-BP, PEROXIN-5, |
| | | | | | | | | | B; PTS1-CONTAINING PEPTIDE; | PTS1 PROTEIN-PEPTIDE COMPLEX, |
| | | | | | | | | | CHAIN: C, D; | TETRATRICOPEPTIDE REPEAT, TPR, |
| | | | | | | | | | | 2 HELICAL REPEAT |
| 407 | 1fch | A | 550 | 840 | 5.1e−15 | −0.44 | 0.07 | | PEROXISOMAL TARGETING | SIGNALING PROTEIN PEROXISMORE |
| | | | | | | | | | SIGNAL 1 RECEPTOR; CHAIN: A, | RECEPTOR 1, PTS1-BP, PEROXIN-5, |
| | | | | | | | | | B; PTS1-CONTAINING PEPTIDE; | PTS1 PROTEIN-PEPTIDE COMPLEX, |
| | | | | | | | | | CHAIN: C, D; | TETRATRICOPEPTIDE REPEAT, TPR, |
| | | | | | | | | | | 2 HELICAL REPEAT |
| 407 | 4hb1 | | 703 | 744 | 0.0036 | −0.01 | 0.10 | | DHP1; CHAIN: NULL; | DESIGNED HELICAL BUNDLE |
| | | | | | | | | | | DESIGNED HELICAL BUNDLE |
| 414 | 1a5j | | 112 | 146 | 0.00075 | −0.08 | 0.62 | | B-MYB; CHAIN: NULL; | DNA-BINDING PROTEIN DNA- |
| | | | | | | | | | | BINDING PROTEIN, |
| | | | | | | | | | | PROTOONCOGENE PRODUCT |
| 414 | 1ak2 | | 749 | 973 | 1.7e−52 | | | 304.37 | ADENYLATE KINASE | PHOSPHOTRANSFERASE ATP\;AMP |
| | | | | | | | | | ISOENZYME-2; CHAIN: NULL; | PHOSPHOTRANSFERASE, |
| | | | | | | | | | | MYOKINASE; NUCLEOSIDE |
| | | | | | | | | | | MONOPHOSPHATE KINASE, |
| | | | | | | | | | | PHOSPHOTRANSFERASE |
| 414 | 1ak2 | | 756 | 972 | 1.7e−52 | 0.84 | 1.00 | | ADENYLATE KINASE | PHOSPHOTRANSFERASE ATP\:AMP |
| | | | | | | | | | ISOENZYME-2; CHAIN: NULL; | PHOSPHOTRANSFERASE, |
| | | | | | | | | | | MYOKINASE; NUCLEOSIDE |
| | | | | | | | | | | MONOPHOSPHATE KINASE, |
| | | | | | | | | | | PHOSPHOTRANSFERASE |
| 414 | 1aky | | 751 | 971 | 4.5e−78 | | | 212.52 | ADENYLATE KINASE; 1AKY 4 | TRANSFERASE |
| | | | | | | | | | CHAIN: NULL; 1AKY 5 | (PHOSPHOTRANSFERASE) ATP\:AMP |
| | | | | | | | | | | PHOSPHOTRANSFERASE, |
| | | | | | | | | | | MYOKINASE; 1AKY 6 ATP:AMP |
| | | | | | | | | | | PHOSPHOTRANSFERASE, |
| | | | | | | | | | | MYOKINASE 1AKY 15 |
| 414 | 1aky | | 767 | 970 | 4.5e−78 | 0.66 | 1.00 | | ADENYLATE KINASE; 1AKY 4 | TRANSFERASE |
| | | | | | | | | | CHAIN: NULL; 1AKY 5 | (PHOSPHOTRANSFERASE) ATP\:AMP |
| | | | | | | | | | | PHOSPHOTRANSFERASE, |
| | | | | | | | | | | MYOKINASE; 1AKY 6 ATP:AMP |
| | | | | | | | | | | PHOSPHOTRANSFERASE, |
| | | | | | | | | | | MYOKINASE 1AKY 15 |
| 414 | 1e4v | A | 767 | 967 | 1.5e−74 | 0.13 | 1.00 | | ADENYLATE KINASE; CHAIN: A; | TRANSFERASE(PHOSPHOTRANSFERASE) |
| | | | | | | | | | | TRANSFERASE(PHOSPHOTRANSFERASE) |
| 414 | 1mbj | | 113 | 146 | 7.5e−05 | −0.18 | 0.51 | | MYB PROTO-ONCOGENE | DNA BINDING PROTEIN |
| | | | | | | | | | PROTEIN; 1MBJ 4 | PROTOONCOGENE PRODUCT 1MBJ |
| | | | | | | | | | | 12 |
| 414 | 1mse | C | 113 | 146 | 0.0015 | −0.06 | 0.55 | | COMPLEX (BINDING | |
| | | | | | | | | | PROTEIN/DNA) C-MYB DNA- | |
| | | | | | | | | | BINDING DOMAIN COMPLEXED | |
| | | | | | | | | | WITH DNA 1MSE 3 (NMR, | |
| | | | | | | | | | MINIMIZED AVERAGE | |
| | | | | | | | | | STRUCTURE) 1MSE 4 1MSE 84 | |
| 415 | 1e7u | A | 3501 | 3986 | 1e−68 | 0.10 | 0.86 | | PHOSPHATIDYLINOSITOL 3- | PHOSPHOINOSITIDE 3-KINASE |
| | | | | | | | | | KINASE CATALYTIC SUBUNIT; | GAMMA PTDINS-3-KINASE P110, |
| | | | | | | | | | CHAIN: A; | P13K, P1 3K; PHOSPHOINOSITIDE 3- |
| | | | | | | | | | | KINASE GAMMA, SECONDARY |
| | | | | | | | | | | MESSENGER 2 GENERATION, P13K, P1 |
| | | | | | | | | | | 3K, WORTMANNIN |
| 415 | 1e8y | A | 3501 | 3986 | 3.4e−68 | 0.02 | 1.00 | | PHOSPHATIDYLINOSITOL 3- | PHOSPHOINOSITIDE 3-KINASE |
| | | | | | | | | | KINASE CATALYTIC SUBUNIT; | GAMMA PTDINS-3-KINASE P110, |
| | | | | | | | | | CHAIN: A; | P13K; PHOSPHOINOSITIDE 3-KINASE |
| | | | | | | | | | | GAMMA, SECONDARY MESSENGER 2 |
| | | | | | | | | | | GENERATION, P13K, P1 3K |
| 415 | 3fap | B | 3581 | 3674 | 1.4e−24 | 0.05 | −0.18 | | FK506-BINDING PROTEIN; CHAIN: | CELL CYCLE FKBP12; FRAP FKBP12, |
| | | | | | | | | | A; FKBP12-RAPAMYCIN | FRAP, RAPAMYCIN, COMPLEX, GENE |
| | | | | | | | | | ASSOCIATED PROTEIN; CHAIN: | THERAPY |
| | | | | | | | | | B; | |
| 415 | 1e7u | A | 3480 | 4043 | 8.5e−83 | −0.12 | 0.37 | | PHOSPHATIDYLINOSITOL 3- | PHOSPHOINOSITIDE 3-KINASE |
| | | | | | | | | | KINASE CATALYTIC SUBUNIT; | GAMMA PTDINS-3-KINASE P110, |
| | | | | | | | | | CHAIN: A; | P13K, P1 3K; PHOSPHOINOSITIDE 3- |
| | | | | | | | | | | KINASE GAMMA, SECONDARY |
| | | | | | | | | | | MESSENGER 2 GENERATION, P13K, P1 |
| | | | | | | | | | | 3K, WORTMANNIN |
| 415 | 1e8y | A | 3480 | 4043 | 1e−77 | 0.13 | 0.94 | | PHOSPHATIDYLINOSITOL 3- | PHOSPHOINOSITIDE 3-KINASE |
| | | | | | | | | | KINASE CATALYTIC SUBUNIT; | GAMMA PTDINS-3-KINASE P110, |
| | | | | | | | | | CHAIN: A; | P13K; PHOSPHOINOSITIDE 3-KINASE |
| | | | | | | | | | | GAMMA, SECONDARY MESSENGER 2 |
| | | | | | | | | | | GENERATION, P13K, P1 3K |
| 415 | 3fap | B | 3581 | 3673 | 1.5e−21 | 0.07 | −0.18 | | FK506-BINDING PROTEIN; CHAIN: | CELL CYCLE FKBP12; FRAP FKBP12, |
| | | | | | | | | | A; FKBP12-RAPAMYCIN | FRAP, RAPAMYCIN, COMPLEX, GENE |
| | | | | | | | | | ASSOCIATED PROTEIN; CHAIN: | THERAPY |
| | | | | | | | | | B; | |
| 416 | 1e7u | A | 3501 | 3986 | 1e−68 | 0.10 | 0.86 | | PHOSPHATIDYLINOSITOL 3- | PHOSPHOINOSITIDE 3-KINASE |
| | | | | | | | | | KINASE CATALYTIC SUBUNIT; | GAMMA PTDINS-3-KINASE P110, |
| | | | | | | | | | CHAIN: A; | P13K, P1 3K; PHOSPHOINOSITIDE 3- |
| | | | | | | | | | | KINASE GAMMA, SECONDARY |
| | | | | | | | | | | MESSENGER 2 GENERATION, P13K, P1 |
| | | | | | | | | | | 3K, WORTMANNIN |
| 416 | 1e8y | A | 3501 | 3986 | 3.4e−68 | 0.02 | 1.00 | | PHOSPHATIDYLINOSITOL 3- | PHOSPHOINOSITIDE 3-KINASE |
| | | | | | | | | | KINASE CATALYTIC SUBUNIT; | GAMMA PTDINS-3-KINASE P110, |
| | | | | | | | | | CHAIN: A; | P13K; PHOSPHOINOSITIDE 3-KINASE |
| | | | | | | | | | | GAMMA, SECONDARY MESSENGER 2 |
| | | | | | | | | | | GENERATION, P13K, P1 3K |
| 416 | 3fap | B | 3581 | 3674 | 1.4e−24 | 0.05 | −0.18 | | FK506-BINDING PROTEIN; CHAIN: | CELL CYCLE FKBP12; FRAP FKBP12, |
| | | | | | | | | | A; FKBP12-RAPAMYCIN | FRAP, RAPAMYCIN, COMPLEX, GENE |
| | | | | | | | | | ASSOCIATED PROTEIN; CHAIN: | THERAPY |
| | | | | | | | | | B; | |
| 416 | 1e7u | A | 3480 | 4043 | 8.5e−83 | −0.12 | 0.37 | | PHOSPHATIDYLINOSITOL 3- | PHOSPHOINOSITIDE 3-KINASE |
| | | | | | | | | | KINASE CATALYTIC SUBUNIT; | GAMMA PTDINS-3-KINASE P110, |
| | | | | | | | | | CHAIN: A; | P13K, P1 3K; PHOSPHOINOSITIDE 3- |
| | | | | | | | | | | KINASE GAMMA, SECONDARY |
| | | | | | | | | | | MESSENGER 2 GENERATION, P13K, P1 |
| | | | | | | | | | | 3K, WORTMANNIN |
| 416 | 1e8y | A | 3480 | 4043 | 1e−77 | 0.13 | 0.94 | | PHOSPHATIDYLINOSITOL 3- | PHOSPHOINOSITIDE 3-KINASE |
| | | | | | | | | | KINASE CATALYTIC SUBUNIT; | GAMMA PTDINS-3-KINASE P110, |
| | | | | | | | | | CHAIN: A; | P13K; PHOSPHOINOSITIDE 3-KINASE |
| | | | | | | | | | | GAMMA, SECONDARY MESSENGER 2 |
| | | | | | | | | | | GENERATION, P13K, P1 3K |
| 416 | 3fap | B | 3581 | 3673 | 1.5e−21 | 0.07 | −0.18 | | FK506-BINDING PROTEIN; CHAIN: | CELL CYCLE FKBP12; FRAP FKBP12, |
| | | | | | | | | | A; FKBP12-RAPAMYCIN | FRAP, RAPAMYCIN, COMPLEX GENE |
| | | | | | | | | | ASSOCIATED PROTEIN; CHAIN: | THERAPY |
| | | | | | | | | | B; | |
| 418 | 1aip | A | 181 | 384 | 1.7e−46 | 0.07 | −0.15 | | ELONGATION FACTOR TU; | COMPLEX OF TWO ELONGATION |
| | | | | | | | | | CHAIN: A, B, E, F; ELONGATION | FACTORS EF-TU; EF-TS; |
| | | | | | | | | | FACTOR TS; CHAIN: C, D, G, H; | ELONGATION FACTOR, |
| | | | | | | | | | | NUCLEOTIDE EXCHANGE, GTP- |
| | | | | | | | | | | BINDING, 2 COMPLEX OF TWO |
| | | | | | | | | | | ELONGATION FACTORS |
| 418 | 1d2e | A | 181 | 386 | 1.7e−44 | 0.32 | −0.17 | | ELONGATION FACTOR TU (EF- | RNA BINDING PROTEIN G-PROTEIN, |
| | | | | | | | | | TU); CHAIN: A, B, C, D | BETA-BARREL |
| 418 | 1e0s | A | 185 | 312 | 3e−05 | 0.05 | 0.07 | | ADP-RIBOSYLATION FACTOR 6; | G PROTEIN G PROTEIN, RAS, ARF, |
| | | | | | | | | | CHAIN: A; | ARF6, MEMBRANE TRAFFIC |
| 418 | 1efe | A | 181 | 386 | 3.4e−50 | 0.20 | −0.17 | | ELONGATION FACTOR; CHAIN: | RNA BINDING PROTEIN EFTU; |
| | | | | | | | | | A, B; | TRANSPORT AND PROTECTION |
| | | | | | | | | | | PROTEIN, RNA BINDING PROTEIN |
| 418 | 1efu | A | 181 | 386 | 5.1e−46 | 0.15 | −0.17 | | ELONGATION FACTOR TU; | COMPLEX (TWO ELONGATION |
| | | | | | | | | | CHAIN: A, C; ELONGATION | FACTORS) ELONGATION FACTOR |
| | | | | | | | | | FACTOR TS; CHAIN: B, D; | FOR TRANSFER, HEAT UNSTABLE, |
| | | | | | | | | | | ELONGATION FACTOR FOR |
| | | | | | | | | | | TRANSFER, HEAT STABLE, |
| | | | | | | | | | | ELONGATION FACTOR, COMPLEX |
| | | | | | | | | | | (TWO ELONGATION FACTORS) |
| 418 | 1ega | A | 186 | 381 | 3.4e−36 | 0.10 | 0.01 | | GTP-BINDING PROTEIN ERA; | HYDROLASE ERA, GTPASE, RNA- |
| | | | | | | | | | CHAIN: A, B; | BINDING, RAS-LIKE, HYDROLASE |
| 418 | 1ega | A | 34 | 185 | 8.5e−13 | 0.23 | −0.19 | | GTP-BINDING PROTEIN ERA; | HYDROLASE ERA, GTPASE, RNA- |
| | | | | | | | | | CHAIN: A, B; | BINDING, RAS-LIKE, HYDROLASE |
| 418 | 1exm | A | 179 | 384 | 5.1e−52 | 0.23 | −0.17 | | ELONGATION FACTOR TU (EF- | TRANSLATION EF-TU; GTPASE, |
| | | | | | | | | | TU); CHAIN: A; | MOLECULAR SWITCH, TRNA, |
| | | | | | | | | | | RIBOSOME, Q-BETA REPLICASE, 2 |
| | | | | | | | | | | CHAPERONE, DISULFIDE |
| | | | | | | | | | | ISOMERASE |
| 418 | 1f60 | A | 179 | 386 | 3.4e−31 | 0.23 | −0.12 | | ELONGATION FACTOR EEFIA; | TRANSLATION PROTEIN-PROTEIN |
| | | | | | | | | | CHAIN: A; ELONGATION FACTOR | COMPLEX |
| | | | | | | | | | EEFIBA; CHAIN: B; | |
| 418 | 1hur | A | 185 | 312 | 9e−05 | 0.06 | 0.12 | | HUMAN ADP-RIBOSYLATION | PROTEIN TRANSPORT GDP-BINDING, |
| | | | | | | | | | FACTOR 1; 1HUR 5 CHAIN: A, B; | MEMBRANE TRAFFICKIN, NON- |
| | | | | | | | | | 1HUR 7 | MYRISTOYLATED 1HUR 16 |
| 421 | 1afh | A | 201 | 281 | 1.2e−26 | −0.10 | 0.99 | | QGSR ZINC FINGER PEPTIDE; | COMPLEX (ZINC FINGER/DNA) |
| | | | | | | | | | CHAIN: A; DUPLEX | COMPLEX (ZINC FINGER/DNA), ZINC |
| | | | | | | | | | OLIGONUCLEOTIDE BINDING | FINGER, DNA-BINDING PROTEIN |
| | | | | | | | | | SITE; CHAIN: B, C; | |
| 421 | 1c2a | A | 396 | 513 | 1e−09 | 0.14 | −0.15 | | BOWMAN-BIRK TRYPSIN | HYDROLASE INHIBITOR ALL-BETA |
| | | | | | | | | | INHIBITOR; CHAIN: A | STRUCTURE, HYDROLASE |
| | | | | | | | | | | INHIBITOR |
| 421 | 1mey | C | 172 | 253 | 6.8e−41 | −0.21 | 0.58 | | DNA; CHAIN: A, B, D, E; | COMPLEX (ZINC FINGER/DNA) ZINC |
| | | | | | | | | | CONSENSUS ZINC FINGER | FINGER, PROTEIN-DNA |
| | | | | | | | | | PROTEIN; CHAIN: C, F, G; | INTERACTION, PROTEIN DESIGN, 2 |
| | | | | | | | | | | CRYSTAL STRUCTURE, COMPLEX |
| | | | | | | | | | | (ZINC FINGER/DNA) |
| 421 | 1mey | C | 200 | 281 | 6.8e−44 | 0.09 | 1.00 | | DNA; CHAIN: A, B, D, E; | COMPLEX (ZINC FINGER/DNA) ZINC |
| | | | | | | | | | CONSENSUS ZINC FINGER | FINGER, PROTEIN-DNA |
| | | | | | | | | | PROTEIN; CHAIN: C, F, G; | INTERACTION, PROTEIN DESIGN, 2 |
| | | | | | | | | | | CRYSTAL STRUCTURE, COMPLEX |
| | | | | | | | | | | (ZINC FINGER/DNA) |
| 421 | 1mey | C | 228 | 309 | 3.4e−46 | 0.64 | 1.00 | | DNA; CHAIN: A, B, D, E; | COMPLEX (ZINC FINGER/DNA) ZINC |
| | | | | | | | | | CONSENSUS ZINC FINGER | FINGER, PROTEIN-DNA |
| | | | | | | | | | PROTEIN; CHAIN: C, F, G; | INTERACTION, PROTEIN DESIGN, 2 |
| | | | | | | | | | | CRYSTAL STRUCTURE, COMPLEX |
| | | | | | | | | | | (ZINC FINGER/DNA) |
| 421 | 1mey | C | 256 | 337 | 1.4e−47 | 0.60 | 1.00 | | DNA; CHAIN: A, B, D, E; | COMPLEX (ZINC FINGER/DNA) ZINC |
| | | | | | | | | | CONSENSUS ZINC FINGER | FINGER, PROTEIN-DNA |
| | | | | | | | | | PROTEIN; CHAIN: C, F, G; | INTERACTION, PROTEIN DESIGN, 2 |
| | | | | | | | | | | CRYSTAL STRUCTURE, COMPLEX |
| | | | | | | | | | | (ZINC FINGER/DNA) |
| 421 | 1mey | C | 284 | 365 | 1.7e−48 | 0.55 | 1.00 | | DNA; CHAIN: A, B, D, E; | COMPLEX (ZINC FINGER/DNA) ZINC |
| | | | | | | | | | CONSENSUS ZINC FINGER | FINGER, PROTEIN-DNA |
| | | | | | | | | | PROTEIN; CHAIN: C, F, G; | INTERACTION, PROTEIN DESIGN, 2 |
| | | | | | | | | | | CRYSTAL STRUCTURE, COMPLEX |
| | | | | | | | | | | (ZINC FINGER/DNA) |
| 421 | 1mey | C | 312 | 393 | 3.4e−49 | 0.50 | 1.00 | | DNA; CHAIN: A, B, D, E; | COMPLEX (ZINC FINGER/DNA) ZINC |
| | | | | | | | | | CONSENSUS ZINC FINGER | FINGER, PROTEIN-DNA |
| | | | | | | | | | PROTEIN; CHAIN: C, F, G; | INTERACTION, PROTEIN DESIGN, 2 |
| | | | | | | | | | | CRYSTAL STRUCTURE, COMPLEX |
| | | | | | | | | | | (ZINC FINGER/DNA) |
| 421 | 1mey | C | 340 | 421 | 6.8e−49 | 0.61 | 1.00 | | DNA; CHAIN: A, B, D, E; | COMPLEX (ZINC FINGER/DNA) ZINC |
| | | | | | | | | | CONSENSUS ZINC FINGER | FINGER, PROTEIN-DNA |
| | | | | | | | | | PROTEIN; CHAIN: C, F, G; | INTERACTION, PROTEIN DESIGN, 2 |
| | | | | | | | | | | CRYSTAL STRUCTURE, COMPLEX |
| | | | | | | | | | | (ZINC FINGER/DNA) |
| 421 | 1mey | C | 368 | 449 | 5.1e−50 | 0.34 | 1.00 | | DNA; CHAIN: A, B, D, E; | COMPLEX (ZINC FINGER/DNA) ZINC |
| | | | | | | | | | CONSENSUS ZINC FINGER | FINGER, PROTEIN-DNA |
| | | | | | | | | | PROTEIN; CHAIN: C, F, G; | INTERACTION, PROTEIN DESIGN, 2 |
| | | | | | | | | | | CRYSTAL STRUCTURE, COMPLEX |
| | | | | | | | | | | (ZINC FINGER/DNA) |
| 421 | 1mey | C | 396 | 477 | 3.4e−51 | 0.56 | 1.00 | | DNA; CHAIN: A, B, D, E; | COMPLEX (ZINC FINGER/DNA) ZINC |
| | | | | | | | | | CONSENSUS ZINC FINGER | FINGER, PROTEIN-DNA |
| | | | | | | | | | PROTEIN; CHAIN: C, F, G; | INTERACTION, PROTEIN DESIGN, 2 |
| | | | | | | | | | | CRYSTAL STRUCTURE, COMPLEX |
| | | | | | | | | | | (ZINC FINGER/DNA) |
| 421 | 1mey | C | 424 | 505 | 5.1e−51 | 0.53 | 1.00 | | DNA; CHAIN: A, B, D, E; | COMPLEX (ZINC FINGER/DNA) ZINC |
| | | | | | | | | | CONSENSUS ZINC FINGER | FINGER, PROTEIN-DNA |
| | | | | | | | | | PROTEIN; CHAIN: C, F, G; | INTERACTION, PROTEIN DESIGN, 2 |
| | | | | | | | | | | CRYSTAL STRUCTURE, COMPLEX |
| | | | | | | | | | | (ZINC FINGER/DNA) |
| 421 | 1mey | C | 452 | 533 | 6.8e−51 | 0.42 | 1.00 | | DNA; CHAIN: A, B, D, E; | COMPLEX (ZINC FINGER/DNA) ZINC |
| | | | | | | | | | CONSENSUS ZINC FINGER | FINGER, PROTEIN-DNA |
| | | | | | | | | | PROTEIN; CHAIN: C, F, G; | INTERACTION, PROTEIN DESIGN, 2 |
| | | | | | | | | | | CRYSTAL STRUCTURE, COMPLEX |
| | | | | | | | | | | (ZINC FINGER/DNA) |
| 421 | 1mey | C | 452 | 534 | 5.1e−51 | | | 108.34 | DNA; CHAIN: A, B, D, E; | COMPLEX (ZINC FINGER/DNA) ZINC |
| | | | | | | | | | CONSENSUS ZINC FINGER | FINGER, PROTEIN-DNA |
| | | | | | | | | | PROTEIN; CHAIN: C, F, G; | INTERACTION, PROTEIN DESIGN, 2 |
| | | | | | | | | | | CRYSTAL STRUCTURE, COMPLEX |
| | | | | | | | | | | (ZINC FINGER/DNA) |
| 421 | 1mey | C | 480 | 561 | 1.7e−50 | 0.40 | 1.00 | | DNA; CHAIN: A, B, D, E; | COMPLEX (ZINC FINGER/DNA) ZINC |
| | | | | | | | | | CONSENSUS ZINC FINGER | FINGER, PROTEIN-DNA |
| | | | | | | | | | PROTEIN; CHAIN: C, F, G; | INTERACTION, PROTEIN DESIGN, 2 |
| | | | | | | | | | | CRYSTAL STRUCTURE, COMPLEX |
| | | | | | | | | | | (ZINC FINGER/DNA) |
| 421 | 1mey | C | 508 | 589 | 8.5e−51 | 0.63 | 1.00 | | DNA; CHAIN: A, B, D, E; | COMPLEX (ZINC FINGER/DNA) ZINC |
| | | | | | | | | | CONSENSUS ZINC FINGER | FINGER, PROTEIN-DNA |
| | | | | | | | | | PROTEIN; CHAIN: C, F, G; | INTERACTION, PROTEIN DESIGN, 2 |
| | | | | | | | | | | CRYSTAL STRUCTURE, COMPLEX |
| | | | | | | | | | | (ZINC FINGER/DNA) |
| 421 | 1mey | C | 536 | 617 | 1.5e−50 | 0.31 | 1.00 | | DNA; CHAIN: A, B, D, E; | COMPLEX (ZINC FINGER/DNA) ZINC |
| | | | | | | | | | CONSENSUS ZINC FINGER | FINGER, PROTEIN-DNA |
| | | | | | | | | | PROTEIN; CHAIN: C, F, G; | INTERACTION, PROTEIN DESIGN, 2 |
| | | | | | | | | | | CRYSTAL STRUCTURE, COMPLEX |
| | | | | | | | | | | (ZINC FINGER/DNA) |
| 421 | 1mey | C | 564 | 641 | 5.1e−46 | 0.13 | 1.00 | | DNA; CHAIN: A, B, D, E; | COMPLEX (ZINC FINGER/DNA) ZINC |
| | | | | | | | | | CONSENSUS ZINC FINGER | FINGER, PROTEIN-DNA |
| | | | | | | | | | PROTEIN; CHAIN: C, F, G; | INTERACTION, PROTEIN DESIGN, 2 |
| | | | | | | | | | | CRYSTAL STRUCTURE, COMPLEX |
| | | | | | | | | | | (ZINC FINGER/DNA) |
| 421 | 1tf6 | A | 201 | 346 | 5.1e−35 | 0.01 | 0.96 | | TFIIIA; CHAIN: A, D; 5S | COMPLEX (TRANSCRIPTION |
| | | | | | | | | | RIBOSOMAL RNA GENE; CHAIN: | REGULATION/DNA) COMPLEX |
| | | | | | | | | | B, C, E, F; | (TRANSCRIPTION |
| | | | | | | | | | | REGULATION/DNA), RNA |
| | | | | | | | | | | POLYMERASE III, 2 TRANSCRIPTION |
| | | | | | | | | | | INITIATION, ZINC FINGER PROTEIN |
| 421 | 1tf6 | A | 257 | 402 | 1.4e−36 | 0.24 | 1.00 | | TFIIIA; CHAIN: A, D; 5S | COMPLEX (TRANSCRIPTION |
| | | | | | | | | | RIBOSOMAL RNA GENE; CHAIN: | REGULATION/DNA) COMPLEX |
| | | | | | | | | | B, C, E, F; | (TRANSCRIPTION |
| | | | | | | | | | | REGULATION/DNA), RNA |
| | | | | | | | | | | POLYMERASE III, 2 TRANSCRIPTION |
| | | | | | | | | | | INITIATION, ZINC FINGER PROTEIN |
| 421 | 1tf6 | A | 369 | 514 | 1.7e−38 | 0.25 | 1.00 | | TFIIIA; CHAIN: A, D; 5S | COMPLEX (TRANSCRIPTION |
| | | | | | | | | | RIBOSOMAL RNA GENE; CHAIN: | REGULATION/DNA) COMPLEX |
| | | | | | | | | | B, C, E, F; | (TRANSCRIPTION |
| | | | | | | | | | | REGULATION/DNA), RNA |
| | | | | | | | | | | POLYMERASE III, 2 TRANSCRIPTION |
| | | | | | | | | | | INITIATION, ZINC FINGER PROTEIN |
| 421 | 1tf6 | A | 396 | 559 | 1.7e−38 | | | 118.07 | TFIIIA; CHAIN: A, D; 5S | COMPLEX (TRANSCRIPTION |
| | | | | | | | | | RIBOSOMAL RNA GENE; CHAIN: | REGULATION/DNA) COMPLEX |
| | | | | | | | | | B, C, E, F; | (TRANSCRIPTION |
| | | | | | | | | | | REGULATION/DNA), RNA |
| | | | | | | | | | | POLYMERASE III, 2 TRANSCRIPTION |
| | | | | | | | | | | INITIATION, ZINC FINGER PROTEIN |
| 421 | 1tf6 | A | 481 | 627 | 5.1e−38 | 0.04 | 1.00 | | TFIIIA; CHAIN: A, D; 5S | COMPLEX (TRANSCRIPTION |
| | | | | | | | | | RIBOSOMAL RNA GENE; CHAIN: | REGULATION/DNA) COMPLEX |
| | | | | | | | | | B, C, E, F; | (TRANSCRIPTION |
| | | | | | | | | | | REGULATION/DNA), RNA |
| | | | | | | | | | | POLYMERASE III, 2 TRANSCRIPTION |
| | | | | | | | | | | INITIATION, ZINC FINGER PROTEIN |
| 421 | 1ubd | C | 182 | 309 | 3e−26 | −0.20 | 0.18 | | YY1; CHAIN: C; ADENO- | COMPLEX (TRANSCRIPTION |
| | | | | | | | | | ASSOCIATED VIRUS P5 | REGULATION/DNA) YING-YANG 1; |
| | | | | | | | | | INITIATOR ELEMENT DNA; | TRANSCRIPTION lNITIATION, |
| | | | | | | | | | CHAIN: A, B; | INITIATOR ELEMENT, YY1, ZINC 2 |
| | | | | | | | | | | FINGER PROTEIN, DNA-PROTEIN |
| | | | | | | | | | | RECOGNITION, 3 COMPLEX |
| | | | | | | | | | | (TRANSCRIPTION |
| | | | | | | | | | | REGULATION/DNA) |
| 421 | 1ubd | C | 203 | 309 | 3.4e−31 | 0.06 | 1.00 | | YY1; CHAIN: C; ADENO- | COMPLEX (TRANSCRIPTION |
| | | | | | | | | | ASSOCIATED VIRUS P5 | REGULATION/DNA) YING-YANG 1; |
| | | | | | | | | | INITIATOR ELEMENT DNA; | TRANSCRIPTION INITIATION, |
| | | | | | | | | | CHAIN: A, B; | INITIATOR ELEMENT, YY1, ZINC 2 |
| | | | | | | | | | | FINGER PROTEIN, DNA-PROTEIN |
| | | | | | | | | | | RECOGNITION, 3 COMPLEX |
| | | | | | | | | | | (TRANSCRIPTION |
| | | | | | | | | | | REGULATION/DNA) |
| 421 | 1ubd | C | 228 | 337 | 3e−51 | 0.33 | 1.00 | | YY1; CHAIN: C; ADENO- | COMPLEX (TRANSCRIPTION |
| | | | | | | | | | ASSOCIATED VIRUS P5 | REGULATION/DNA) YING-YANG 1; |
| | | | | | | | | | INITIATOR ELEMENT DNA; | TRANSCRIPTION INITIATION, |
| | | | | | | | | | CHAIN: A, B; | INITIATOR ELEMENT, YY1, ZINC 2 |
| | | | | | | | | | | FINGER PROTEIN, DNA-PROTEIN |
| | | | | | | | | | | RECOGNITION, 3 COMPLEX |
| | | | | | | | | | | (TRANSCRIPTION |
| | | | | | | | | | | REGULATION/DNA) |
| 421 | 1ubd | C | 282 | 393 | 4.5e−53 | 0.48 | 1.00 | | YY1; CHAIN: C; ADENO- | COMPLEX (TRANSCRIPTION |
| | | | | | | | | | ASSOCIATED VIRUS P5 | REGULATION/DNA) YING-YANG 1; |
| | | | | | | | | | INITIATOR ELEMENT DNA; | TRANSCRIPTION INITIATION, |
| | | | | | | | | | CHAIN: A, B; | INITIATOR ELEMENT, YY1, ZINC 2 |
| | | | | | | | | | | FINGER PROTEIN, DNA-PROTEIN |
| | | | | | | | | | | RECOGNITION, 3 COMPLEX |
| | | | | | | | | | | (TRANSCRIPTION |
| | | | | | | | | | | REGULATION/DNA) |
| 421 | 1ubd | C | 284 | 394 | 4.5e−53 | | | 92.65 | YY1; CHAIN: C; ADENO- | COMPLEX (TRANSCRIPTION |
| | | | | | | | | | ASSOCIATED VIRUS P5 | REGULATION/DNA) YING-YANG 1 |
| | | | | | | | | | INITIATOR ELEMENT DNA; | TRANSCRIPTION INITIATION, |
| | | | | | | | | | CHAIN: A, B; | INITIATOR ELEMENT, YY1, ZINC 2 |
| | | | | | | | | | | FINGER PROTEIN, DNA-PROTEIN |
| | | | | | | | | | | RECOGNITION, 3 COMPLEX |
| | | | | | | | | | | (TRANSCRIPTION |
| | | | | | | | | | | REGULATION/DNA) |
| 421 | 1ubd | C | 320 | 421 | 1.2e−33 | 0.29 | 1.00 | | YY1; CHAIN: C; ADENO- | COMPLEX (TRANSCRIPTION |
| | | | | | | | | | ASSOCIATED VIRUS P5 | REGULATION/DNA) YING-YANG 1; |
| | | | | | | | | | INITIATOR ELEMENT DNA; | TRANSCRIPTION INITIATION, |
| | | | | | | | | | CHAIN: A, B; | INITIATOR ELEMENT, YY1, ZINC 2 |
| | | | | | | | | | | FINGER PROTEIN, DNA-PROTEIN |
| | | | | | | | | | | RECOGNITION, 3 COMPLEX |
| | | | | | | | | | | (TRANSCRIPTION |
| | | | | | | | | | | REGULATION/DNA) |
| 421 | 1ubd | C | 348 | 449 | 1.7e−34 | 0.15 | 1.00 | | YY1; CHAIN: C; ADENO- | COMPLEX (TRANSCRIPTION |
| | | | | | | | | | ASSOCIATED VIRUS P5 | REGULATION/DNA) YING-YANG 1; |
| | | | | | | | | | INITIATOR ELEMENT DNA; | TRANSCRIPTION INITIATION, |
| | | | | | | | | | CHAIN: A, B; | INITIATOR ELEMENT, YY1, ZINC 2 |
| | | | | | | | | | | FINGER PROTEIN, DNA-PROTEIN |
| | | | | | | | | | | RECOGNITION, 3 COMPLEX |
| | | | | | | | | | | (TRANSCRIPTION |
| | | | | | | | | | | REGULATION/DNA) |
| 421 | 1ubd | C | 366 | 477 | 3e−53 | 0.23 | 1.00 | | YY1; CHAIN: C; ADENO- | COMPLEX (TRANSCRIPTION |
| | | | | | | | | | ASSOCIATED VIRUS P5 | REGULATION/DNA) YING-YANG 1; |
| | | | | | | | | | INITIATOR ELEMENT DNA; | TRANSCRIPTION INITIATION, |
| | | | | | | | | | CHAIN: A, B; | INITIATOR ELEMENT, YY1, ZINC 2 |
| | | | | | | | | | | FINGER PROTEIN, DNA-PROTEIN |
| | | | | | | | | | | RECOGNITION, 3 COMPLEX |
| | | | | | | | | | | (TRANSCRIPTION |
| | | | | | | | | | | REGULATION/DNA) |
| 421 | 1ubd | C | 376 | 477 | 3.4e−36 | 0.36 | 1.00 | | YY1; CHAIN: C; ADENO- | COMPLEX (TRANSCRIPTION |
| | | | | | | | | | ASSOCIATED VIRUS P5 | REGULATION/DNA) YING-YANG 1; |
| | | | | | | | | | INITIATOR ELEMENT DNA; | TRANSCRIPTION INITIATION, |
| | | | | | | | | | CHAIN: A, B; | INITIATOR ELEMENT, YY1, ZINC 2 |
| | | | | | | | | | | FINGER PROTEIN, DNA-PROTEIN |
| | | | | | | | | | | RECOGNITION, 3 COMPLEX |
| | | | | | | | | | | (TRANSCRIPTION |
| | | | | | | | | | | REGULATION/DNA) |
| 421 | 1ubd | C | 401 | 505 | 8.5e−36 | 0.16 | 1.00 | | YY1; CHAIN: C; ADENO- | COMPLEX (TRANSCRIPTION |
| | | | | | | | | | ASSOCIATED VIRUS P5 | REGULATION/DNA) YING-YANG 1; |
| | | | | | | | | | INITIATOR ELEMENT DNA; | TRANSCRIPTION INITIATION, |
| | | | | | | | | | CHAIN: A, B; | INITIATOR ELEMENT, YY1, ZINC 2 |
| | | | | | | | | | | FINGER PROTEIN, DNA-PROTEIN |
| | | | | | | | | | | RECOGNITION, 3 COMPLEX |
| | | | | | | | | | | (TRANSCRIPTION |
| | | | | | | | | | | REGULATION/DNA) |
| 421 | 1ubd | C | 422 | 533 | 6e−56 | 0.28 | 1.00 | | YY1; CHAIN: C; ADENO- | COMPLEX (TRANSCRIPTION |
| | | | | | | | | | ASSOCIATED VIRUS P5 | REGULATION/DNA) YING-YANG 1; |
| | | | | | | | | | INITIATOR ELEMENT DNA; | TRANSCRIPTION INITIATION, |
| | | | | | | | | | CHAIN: A, B; | INITIATOR ELEMENT, YY1, ZINC 2 |
| | | | | | | | | | | FINGER PROTEIN, DNA-PROTEIN |
| | | | | | | | | | | RECOGNITION, 3 COMPLEX |
| | | | | | | | | | | (TRANSCRIPTION |
| | | | | | | | | | | REGULATION/DNA) |
| 421 | 1ubd | C | 450 | 562 | 3e−55 | 0.16 | 0.96 | | YY1; CHAIN: C; ADENO- | COMPLEX (TRANSCRIPTION |
| | | | | | | | | | ASSOCIATED VIRUS P5 | REGULATION/DNA) YING-YANG 1; |
| | | | | | | | | | INITIATOR ELEMENT DNA; | TRANSCRIPTION INITIATION, |
| | | | | | | | | | CHAIN: A, B; | INITIATOR ELEMENT, YY1, ZINC 2 |
| | | | | | | | | | | FINGER PROTEIN, DNA-PROTEIN |
| | | | | | | | | | | RECOGNITION, 3 COMPLEX |
| | | | | | | | | | | (TRANSCRIPTION |
| | | | | | | | | | | REGULATION/DNA) |
| 421 | 1ubd | C | 460 | 561 | 1.7e−35 | 0.13 | 0.98 | | YY1; CHAIN: C; ADENO- | COMPLEX (TRANSCRIPTION |
| | | | | | | | | | ASSOCIATED VIRUS P5 | REGULATION/DNA) YING-YANG 1; |
| | | | | | | | | | INITIATOR ELEMENT DNA; | TRANSCRIPTION INITIATION, |
| | | | | | | | | | CHAIN: A, B; | INITIATOR ELEMENT, YY1, ZINC 2 |
| | | | | | | | | | | FINGER PROTEIN, DNA-PROTElN |
| | | | | | | | | | | RECOGNITION, 3 COMPLEX |
| | | | | | | | | | | (TRANSCRIPTION |
| | | | | | | | | | | REGULATION/DNA) |
| 421 | 1ubd | C | 478 | 589 | 3e−53 | 0.04 | 1.00 | | YY1; CHAIN: C; ADENO- | COMPLEX (TRANSCRIPTION |
| | | | | | | | | | ASSOCIATED VIRUS P5 | REGULATION/DNA) YING-YANG 1; |
| | | | | | | | | | INITIATOR ELEMENT DNA; | TRANSCRIPTION INITIATION, |
| | | | | | | | | | CHAIN: A, B; | INITIATOR ELEMENT, YY1, ZINC 2 |
| | | | | | | | | | | FINGER PROTEIN, DNA-PROTEIN |
| | | | | | | | | | | RECOGNITION, 3 COMPLEX |
| | | | | | | | | | | (TRANSCRIPTION |
| | | | | | | | | | | REGULATION/DNA) |
| 421 | 1ubd | C | 506 | 617 | 3e−53 | 0.20 | 1.00 | | YY1; CHAIN: C; ADENO- | COMPLEX (TRANSCRIPTION |
| | | | | | | | | | ASSOCIATED VIRUS P5 | REGULATION/DNA) YING-YANG 1; |
| | | | | | | | | | INITIATOR ELEMENT DNA; | TRANSCRIPTION INITIATION, |
| | | | | | | | | | CHAIN: A, B; | INITIATOR ELEMENT, YY1, ZINC 2 |
| | | | | | | | | | | FINGER PROTEIN, DNA-PROTEIN |
| | | | | | | | | | | RECOGNITION, 3 COMPLEX |
| | | | | | | | | | | (TRANSCRIPTION |
| | | | | | | | | | | REGULATION/DNA) |
| 421 | 1ubd | C | 516 | 617 | 5.1e−34 | 0.34 | 0.96 | | YY1; CHAIN: C; ADENO- | COMPLEX (TRANSCRIPTION |
| | | | | | | | | | ASSOCIATED VIRUS P5 | REGULATION/DNA) YING-YANG 1; |
| | | | | | | | | | INITIATOR ELEMENT DNA; | TRANSCRIPTION INTIATION, |
| | | | | | | | | | CHAIN: A, B; | INITIATOR ELEMENT, YY1, ZINC 2 |
| | | | | | | | | | | FINGER PROTEIN, DNA-PROTEIN |
| | | | | | | | | | | RECOGNITION, 3 COMPLEX |
| | | | | | | | | | | (TRANSCRIPTION |
| | | | | | | | | | | REGULATION/DNA) |
| 421 | 1ubd | C | 534 | 641 | 1.1e−39 | 0.17 | 0.98 | | YY1; CHAIN: C; ADENO- | COMPLEX (TRANSCRIPlION |
| | | | | | | | | | ASSOCIATED VIRUS P5 | REGULATION/DNA) YING-YANG 1; |
| | | | | | | | | | INITIATOR ELEMENT DNA; | TRANSCRIPTION INITIATION, |
| | | | | | | | | | CHAIN: A, B; | INITIATOR ELEMENT, YY1, ZINC 2 |
| | | | | | | | | | | FINGER PROTEIN, DNA-PROTEIN |
| | | | | | | | | | | RECOGNITION, 3 COMPLEX |
| | | | | | | | | | | (TRANSCRIPTION |
| | | | | | | | | | | REGULATION/DNA) |
| 421 | 2gli | A | 172 | 308 | 1.5e−31 | −0.27 | 0.78 | | ZINC FINGER PROTEIN GLI1; | COMPLEX (DNA-BINDING |
| | | | | | | | | | CHAIN: A; DNA; CHAIN: C, D; | PROTEIN/DNA) FIVE-FINGER GLI; |
| | | | | | | | | | | GLI, ZINC FINGER, COMPLEX (DNA- |
| | | | | | | | | | | BINDING PROTEIN/DNA) |
| 421 | 2gli | A | 192 | 311 | 3e−41 | 0.06 | 0.98 | | ZINC FINGER PROTEIN GLI1; | COMPLEX (DNA-BINDING |
| | | | | | | | | | CHAIN: A; DNA; CHAIN: C, D; | PROTEIN/DNA) FIVE-FINGER GLI; |
| | | | | | | | | | | GLI, ZINC FINGER, COMPLEX (DNA- |
| | | | | | | | | | | BINDING PROTEIN/DNA) |
| 421 | 2gli | A | 228 | 367 | 1.4e−63 | 0.72 | 1.00 | | ZINC FINGER PROTEIN GLI1; | COMPLEX (DNA-BINDING |
| | | | | | | | | | CHAIN: A; DNA; CHAIN: C, D; | PROTEIN/DNA) FIVE-FINGER (GLI; |
| | | | | | | | | | | GLI, ZINC FINGER, COMPLEX (DNA- |
| | | | | | | | | | | BINDING PROTEIN/DNA) |
| 421 | 2gli | A | 264 | 392 | 1.7e−33 | 0.54 | 1.00 | | ZINC FINGER PROTEIN GLI1; | COMPLEX (DNA-BINDING |
| | | | | | | | | | CHAIN: A; DNA; CHAIN: C, D; | PROTEIN/DNA) FIVE-FINGER GLI; |
| | | | | | | | | | | GLI, ZINC FINGER, COMPLEX (DNA- |
| | | | | | | | | | | BINDING PROTEIN/DNA) |
| 421 | 2gli | A | 284 | 423 | 1.4e−63 | | | 110.65 | ZINC FINGER PROTEIN GLI1; | COMPLEX (DNA-BINDING |
| | | | | | | | | | CHAIN: A; DNA; CHAIN: C, D; | PROTEIN/DNA) FIVE-FINGER GLI; |
| | | | | | | | | | | GLI, ZINC FINGER, COMPLEX (DNA- |
| | | | | | | | | | | BINDING PROTEIN/DNA) |
| 421 | 2gli | A | 312 | 535 | 1.5e−67 | −0.12 | 0.75 | | ZINC FINGER PROTEIN GLI1; | COMPLEX (DNA-BINDING |
| | | | | | | | | | CHAIN: A; DNA; CHAIN: C, D; | PROTEIN/DNA) FIVE-FINGER GLI; |
| | | | | | | | | | | GLI, ZINC FINGER, COMPLEX (DNA- |
| | | | | | | | | | | BINDING PROTEIN/DNA) |
| 421 | 2gli | A | 320 | 448 | 3.4e−34 | 0.31 | 0.99 | | ZINC FINGER PROTEIN GLI1; | COMPLEX (DNA-BINDING |
| | | | | | | | | | CHAIN: A; DNA; CHAIN: C, D; | PROTEIN/DNA) FIVE-FINGER GLI; |
| | | | | | | | | | | GL1, ZINC FINGER, COMPLEX (DNA- |
| | | | | | | | | | | BINDING PROTEIN/DNA) |
| 421 | 2gli | A | 404 | 532 | 3.4e−34 | 0.47 | 1.00 | | ZINC FINGER PROTEIN GLI1; | COMPLEX (DNA-BINDING |
| | | | | | | | | | CHAIN: A; DNA; CHAIN: C, D; | PROTEIN/DNA) FIVE-FINGER GLI; |
| | | | | | | | | | | GLI, ZINC FINGER, COMPLEX (DNA- |
| | | | | | | | | | | BINDING PROTEIN/DNA) |
| 421 | 2gli | A | 452 | 591 | 1.5e-70 | 0.39 | 1.00 | | ZINC FINGER PROTEIN GLI1; | COMPLEX (DNA-BINDING |
| | | | | | | | | | CHAIN: A; DNA; CHAIN: C, D; | PROTEIN/DNA) FIVE-FINGER GLI; |
| | | | | | | | | | | GLI, ZINC FINGER, COMPLEX (DNA- |
| | | | | | | | | | | BINDING PROTEIN/DNA) |
| 421 | 2gli | A | 508 | 626 | 7.5e−55 | 0.24 | 0.94 | | ZINC FINGER PROTEIN GLI1; | COMPLEX (DNA-BINDING |
| | | | | | | | | | CHAIN: A; DNA; CHAIN: C, D; | PROTEIN/DNA) FIVE-FINGER GLI; |
| | | | | | | | | | | GLI, ZINC FINGER, COMPLEX (DNA- |
| | | | | | | | | | | BINDING PROTEIN/DNA) |
| 423 | 1bcc | A | 24 | 459 | 0 | 0.90 | 1.00 | | UBIQUINOL CYTOCHROME C | OXIDOREDUCTASE CYTOCHROME |
| | | | | | | | | | OXIDOREDUCTASE; CHAIN: A, B, | BCI COMPLEX, COMPLEX III; |
| | | | | | | | | | C, D, E, F, G, H, I, J; | UBIQUINONE, OXIDOREDUCTASE, |
| | | | | | | | | | | REDOX ENZYME, MEMBRANE |
| | | | | | | | | | | PROTEIN, 2 RESPIRATORY CHAIN, |
| | | | | | | | | | | ELECTRON TRANSPORT |
| 423 | 1bcc | A | 49 | 459 | 0 | | | 457.94 | UBIQUINOL CYTOCHROME C | OXIDOREDUCTASE CYTOCHROME |
| | | | | | | | | | OXIDOREDUCTASE; CHAIN: A, B, | BCI COMPLEX, COMPLEX III; |
| | | | | | | | | | C, D, E, F, C, H, I, J; | UBIQUINONE, OXIDOREDUCTASE, |
| | | | | | | | | | | REDOX ENZYME, MEMBRANE |
| | | | | | | | | | | PROTEIN, 2 RESPIRATORY CHAIN, |
| | | | | | | | | | | ELECTRON TRANSPORT |
| 423 | 1qcr | A | 24 | 459 | 0 | 0.41 | 1.00 | | UBIQUINOL CYTOCHROME C | OXIDOREDUCTASE CYTOCHROME |
| | | | | | | | | | OXIDOREDUCTASE; CHAIN: A, B, | BC1, QCR; BCI, QCR, MEMBRANE |
| | | | | | | | | | C, D, E, F, G, H, I, J, K; | PROTEIN, PROTON |
| | | | | | | | | | | TRANSLOCATION, ELECTRON 2 |
| | | | | | | | | | | TRANSFER, PROTEASE, MPP, |
| | | | | | | | | | | MITOCHONDRIAL PROCESSING 3 |
| | | | | | | | | | | PEPTIDASE, STRUCTURE, |
| | | | | | | | | | | CYTOCHROME CI, CYTOCHROME B, |
| | | | | | | | | | | RIESKE, 4 IRON SULFER PROTEIN, |
| | | | | | | | | | | OXIDOREDUCTASE |
| 426 | 1deq | B | 122 | 285 | 1.4e−52 | −0.25 | 0.62 | | FIBRINOGEN (ALPHA CHAIN); | BLOOD CLOTTING COILED-COIL |
| | | | | | | | | | CHAIN: A, D, N, Q; FIBRINOGEN | |
| | | | | | | | | | (BETA CHAIN); CHAIN: B, E, O, R; | |
| | | | | | | | | | FIBRINOGEN (GAMMA CHAIN); | |
| | | | | | | | | | CHAIN: C, F, P, S; FIBRINOGEN; | |
| | | | | | | | | | CHAIN: M, Z; | |
| 426 | 1deq | C | 53 | 276 | 4.2e−89 | −0.52 | 1.00 | | FIBRINOGEN (ALPHA CHAIN); | BLOOD CLOTTING COIELD-COIL |
| | | | | | | | | | CHAIN: A, D, N, Q; FIBRINOGEN | |
| | | | | | | | | | (BETA CHAIN); CHAIN: B, E, O, R; | |
| | | | | | | | | | FIBRINOGEN (GAMMA CHAIN); | |
| | | | | | | | | | CHAIN: C, F, P, S; FIBRINOGEN; | |
| | | | | | | | | | CHAIN: M, Z; | |
| 426 | 1deq | C | 53 | 286 | 8.5e−45 | −0.58 | 1.00 | | FIBRINOGEN (ALPHA CHAIN); | BLOOD CLOTTING COILED-COIL |
| | | | | | | | | | CHAIN: A, D, N, Q; FIBRINOGEN | |
| | | | | | | | | | (BETA CHAIN); CHAIN: B, E, O, R; | |
| | | | | | | | | | FIBRINOGEN (GAMMA CHAIN); | |
| | | | | | | | | | CHAIN: C, F, P, S; FIBRINOGEN; | |
| | | | | | | | | | CHAIN: M, Z; | |
| 426 | 1ei3 | C | 29 | 286 | 3.4e−52 | −0.58 | 1.00 | | FIBRINOGEN; CHAIN: A, D; | BLOOD CLOTTING COILED COILS, |
| | | | | | | | | | FIBRINOGEN; CHAIN: B, E; | DISULFIDE RINGS, FIBRIN FORMING |
| | | | | | | | | | FIBRINOGEN; CHAIN: C, F; | ENTITIES |
| 426 | 1fzc | C | 123 | 286 | 3.4e−39 | 0.19 | 1.00 | | FIBRIN; CHAIN: A, B, C, D, E, F, G, | BLOOD COAGULATION BLOOD |
| | | | | | | | | | H, I, J; | COAGULATION, PLASMA PROTEIN, |
| | | | | | | | | | | CROSSLINKING |
| 426 | 1fzc | C | 123 | 288 | 3.4e−39 | | | 175.96 | FIBRIN; CHAIN: A, B, C, D, E, F, G, | BLOOD COAGULATION BLOOD |
| | | | | | | | | | H, I, J; | COAGULATION, PLASMA PROTEIN, |
| | | | | | | | | | | CROSSLINKING |
| 426 | 1fzg | C | 128 | 288 | 1e−38 | | | 174.90 | FIBRINOGEN; CHAIN: A, B, C, D, | BLOOD COAGULATION BLOOD |
| | | | | | | | | | E, F, S, T, M, N; | COAGULATION, PLASMA, |
| | | | | | | | | | | PLATELET, FIBRINOGEN, FIBRIN |
| 426 | 1fzg | C | 129 | 286 | 1e−38 | 0.22 | 1.00 | | FIBRINOGEN; CHAIN: A, B, C, D, | BLOOD COAGULATION BLOOD |
| | | | | | | | | | E, F, S, T, M, N; | COAGULATION, PLASMA, |
| | | | | | | | | | | PLATELET, FIBRINOGEN, FIBRIN |
| 432 | 2dnj | A | 21 | 251 | 3.4e−100 | 0.93 | 1.00 | | ENDONUCLEASE | |
| | | | | | | | | | DEOXYRIBONUCLEASE I (DNASE | |
| | | | | | | | | | I) (E.C.3.1.21.1) COMPLEXED | |
| | | | | | | | | | WITH 2DNJ 3 DNA (5′- | |
| | | | | | | | | | D(*GP*CP*GP*AP*TP*CP*GP*CP)- | |
| | | | | | | | | | 3′) 2DNJ 4 | |
| 432 | 2dnj | A | 21 | 252 | 3.4e−100 | | | 202.60 | ENDONUCLEASE | |
| | | | | | | | | | DEOXYRIBONUCLEASE I (DNASE | |
| | | | | | | | | | I) (F.C.3.1.21.1) COMPLEXED | |
| | | | | | | | | | WITH 2DNJ 3 DNA (5′- | |
| | | | | | | | | | D(*GP*CP*GP*AP*TP*CP*GP*CP)- | |
| | | | | | | | | | 3′) 2DNJ 4 | |
| 433 | 1b50 | A | 25 | 92 | 1.1e−28 | | | 90.96 | MIP-1A; CHAIN: A, B; | CHEMOKINE CHEMOKINE, |
| | | | | | | | | | | CYTOKINE, CHEMOTAXIS |
| 433 | 1b50 | A | 26 | 92 | 1.1e−28 | 0.01 | 1.00 | | MIP-1A; CHAIN: A, B; | CHEMOKINE CHEMOKINE, |
| | | | | | | | | | | CYTOKINE, CHEMOTAXIS |
| 433 | 1b50 | A | 27 | 92 | 5.1e−25 | 0.29 | 1.00 | | MIP-1A; CHAIN: A, B; | CHEMOKINE CHEMOKINE, |
| | | | | | | | | | | CYTOKINE, CHEMOTAXIS |
| 433 | 1hum | A | 24 | 92 | 6.8e−25 | | | 114.82 | CYTOKINE(CHEMOTACTIC) | |
| | | | | | | | | | HUMAN MACROPHAGE | |
| | | | | | | | | | INFLAMMATORY PROTEIN 1 | |
| | | | | | | | | | BETA (HMIP-1B) 1HUM 3 (NMR, | |
| | | | | | | | | | MINIMIZED AVERAGE | |
| | | | | | | | | | STRUCTURE) 1HUM 4 | |
| 433 | 1hum | A | 25 | 92 | 6.8e−25 | 0.28 | 1.00 | | CYTOKINE(CHEMOTACTIC) | |
| | | | | | | | | | HUMAN MACROPHAGE | |
| | | | | | | | | | INFLAMMATORY PROTEIN 1 | |
| | | | | | | | | | BETA (HMIP-1B) 1HUM 3 (NMR, | |
| | | | | | | | | | MINIMIZED AVERAGE | |
| | | | | | | | | | STRUCTURE) 1HUM 4 | |
| 433 | 1ncv | A | 24 | 92 | 1.7e−25 | | | 61.57 | MONOCYTE | CYTOKINE NMR, STRUCTURE, MCP- |
| | | | | | | | | | CHEMOATTRACTANT PROTEIN 3; | 3, BETA-CHEMOKINE, CYTOKINE, |
| | | | | | | | | | CHAIN: A, B; | CHEMOTAXIS, 2 HEPARIN-BINDING, |
| | | | | | | | | | | GLYCOPROTEIN |
| 433 | 1ncv | A | 25 | 91 | 1.7e−25 | −0.04 | 0.98 | | MONOCYTE | CYTOKINE NMR, STRUCTURE, MCP- |
| | | | | | | | | | CHEMOATTRACTANT PROTEIN 3; | 3, BETA-CHEMOKINE, CYTOKINE, |
| | | | | | | | | | CHAIN: A, B; | CHEMOTAXIS, 2 HEPARIN-BINDING, |
| | | | | | | | | | | GLYCOPROTEIN |
| 449 | 1awc | B | 114 | 270 | 1.7e−39 | | | 61.04 | GA BINDING PROTEIN ALPHA; | COMPLEX (TRANSCRIPTION |
| | | | | | | | | | CHAIN: A; GA BINDING PROTEIN | REGULATION/DNA) GABPALPHA; |
| | | | | | | | | | BETA 1; CHAIN: B; DNA; CHAIN: | GABPBETA1; COMPLEX |
| | | | | | | | | | D, E; | (TRANSCRIPTION |
| | | | | | | | | | | REGULATION/DNA), DNA-BINDING, 2 |
| | | | | | | | | | | NUCLEAR PROTEIN, ETS DOMAIN, |
| | | | | | | | | | | ANKYRIN REPEATS, |
| | | | | | | | | | | TRANSCRIPTION 3 FACTOR |
| 449 | 1bd8 | | 116 | 273 | 8.4e−33 | | | 57.66 | P191NK4D CDK4/6 INHIBITOR; | TUMOR SUPPRESSOR TUMOR |
| | | | | | | | | | CHAIN: NULL; | SUPPRESSOR, CDK4/6 INHIBITOR, |
| | | | | | | | | | | ANKYRIN MOTIF |
| 449 | 1blx | B | 115 | 276 | 1.4e−32 | | | 53.46 | CYCLIN-DEPENDENT KINASE 6; | COMPLEX (INHIBITOR |
| | | | | | | | | | CHAIN: A; P191NK4D; CHAIN: B; | PROTEIN/KINASE) INHIBITOR |
| | | | | | | | | | | PROTEIN, CYCLIN-DEPENDENT |
| | | | | | | | | | | KINASE, CELL CYCLE 2 CONTROL, |
| | | | | | | | | | | ALPHA/BETA, COMPLEX (INHIBITOR |
| | | | | | | | | | | PROTEIN/KINASE) |
| 449 | 1bu9 | A | 113 | 280 | 3.4e−33 | | | 51.20 | CYCLIN-DEPENDENT KINASE 6 | HORMONE/GROWTH FACTOR P18- |
| | | | | | | | | | INHIBITOR; CHAIN: A; | 1NK4C; CELL CYCLE INHIBITOR, |
| | | | | | | | | | | P181NK4C, TUMOR, SUPPRESSOR, |
| | | | | | | | | | | CYCLIN-2 DEPENDENT KINASE, |
| | | | | | | | | | | HORMONE/GROWTH FACTOR |
| 449 | 1ibb | A | 122 | 273 | 1.5e−32 | | | 53.58 | CYCLIN-DEPENDENT KINASE 6 | CELL CYCLE INHIBITOR P18- |
| | | | | | | | | | INHIBITOR; CHAIN: A, B; | 1NK4C(1NK6); CELL CYCLE |
| | | | | | | | | | | INHIBITOR, P18-1NK4C(1NK6), |
| | | | | | | | | | | ANKYRIN REPEAT, 2 CDK 4/6 |
| | | | | | | | | | | INHIBITOR |
| 449 | 1ikn | D | 81 | 293 | 2.8e−44 | | | 62.44 | NF-KAPPA-B P65 SUBUNIT; | TRANSCRIPTION FACTOR P65; P50D; |
| | | | | | | | | | CHAIN: A; NF-KAPPA-B P50D | TRANSCRIPTION FACTOR, IKB/NFKB |
| | | | | | | | | | SUBUNIT; CHAIN: C; I-KAPPA-B- | COMPLEX |
| | | | | | | | | | ALPHA; CHAIN: D; | |
| 449 | 1myo | | 48 | 166 | 9.8e−27 | | | 54.85 | MYOTROPHIN; CHAIN: NULL | ANK-REPEAT MYOTROPHIN, |
| | | | | | | | | | | ACETYLATION, NMR, ANK-REPEAT |
| 449 | 1nfl | E | 78 | 282 | 2.8e−44 | | | 63.92 | NF-KAPPA-B P65; CHAIN: A, C; | COMPLEX (TRANSCRIPTION |
| | | | | | | | | | NF-KAPPA-B P50; CHAIN: B, D; I- | REG/ANK REPEAT) COMPLEX |
| | | | | | | | | | KAPPA-B-ALPHA; CHAIN: E, F; | (TRANSCRIPTION REGULATION/AN K |
| | | | | | | | | | | REPEAT), ANKYRIN 2 REPEAT HELIX |
| 451 | 1ndh | | 36 | 305 | 5.1e−79 | | | 366.08 | ELECTRON TRANSPORT (FLAVO | |
| | | | | | | | | | PROTEIN) CYTOCHROME B = 5 = | |
| | | | | | | | | | REDUCTASE (E.C.1.6.2.2) 1NDH 3 | |
| 456 | 1tub | A | 2 | 440 | 0 | | | 308.77 | TUBULIN; CHAIN: A, B; | MICROTUBULES MICROTUBULES, |
| | | | | | | | | | | ALPHA-TUBULIN, BETA-TUBULIN, |
| | | | | | | | | | | GTPASE HELIX |
| 456 | 1tub | B | 2 | 440 | 0 | | | 353.89 | TUBULIN; CHAIN: A, B; | MICROTUBULES MICROTUBULES, |
| | | | | | | | | | | ALPHA-TUBULIN, BETA-TUBULIN, |
| | | | | | | | | | | GTPASE HELIX |
| 457 | 1klo | | 82 | 239 | 2.8e−34 | | | 138.52 | LAMININ; CHAIN: NULL; | GLYCOPROTEIN GLYCOPROTEIN |
| 458 | 1bih | A | 1 | 327 | 6.8e−47 | | | 77.74 | HEMOLIN; CHAIN: A, B; | INSECT IMMUNITY INSECT |
| | | | | | | | | | | IMMUNITY, LPS-BINDING, |
| | | | | | | | | | | HOMOPHILIC ADHESION |
| 458 | 1fig | H | 54 | 276 | 0.00034 | | | 61.84 | IMMUNOGLOBULIN | |
| | | | | | | | | | IMMUNOGLOBULIN GI (KAPPA | |
| | | | | | | | | | LIGHT CHAIN) FAB' FRAGMENT | |
| | | | | | | | | | 1FIG 3 | |
| 458 | 1for | H | 64 | 278 | 0.0019 | | | 60.01 | IMMUNOGLOBULIN IGG2A FAB | |
| | | | | | | | | | FRAGMENT (FAB17-1A) | |
| | | | | | | | | | (ORTHORHOMBIC CRYSTAL | |
| | | | | | | | | | FORM) 1FOR 3 | |
| 458 | 1igc | H | 58 | 279 | 0.00017 | | | 61.96 | COMPLEX (ANTIBODY/BINDING | |
| | | | | | | | | | PROTEIN) IGG1 FAB FRAGMENT | |
| | | | | | | | | | COMPLEXED WITH PROTEIN G | |
| | | | | | | | | | (DOMAIN III) HGC 5 PROTEIN G. | |
| | | | | | | | | | STREPTOCOCCUS HGC 15 | |
| 458 | 1itb | B | 1 | 279 | 4.2e−25 | | | 62.51 | INTERLEUKIN-I BETA; CHAIN: A; | COMPLEX |
| | | | | | | | | | TYPE 1 INTERLEUKIN-1 | (IMMUNOGLOBULIN/RECEPTOR) |
| | | | | | | | | | RECEPTOR; CHAIN: B; | IMMUNOGLOBULIN FOLD, |
| | | | | | | | | | | TRANSMEMBRANE, GLYCOPROTEIN, |
| | | | | | | | | | | RECEPTOR, 2 SIGNAL, COMPLEX |
| | | | | | | | | | | (IMMUNOGLOBULIN/RECEPTOR) |
| 458 | 1kb5 | H | 54 | 278 | 0.0024 | | | 63.34 | KB5-C20 T-CELL ANTIGEN | COMPLEX |
| | | | | | | | | | RECEPTOR; CHAIN: A, B; | (IMMUNOGLOBULIN/RECEPTOR) |
| | | | | | | | | | ANTIBODY DESIRE-I; CHAIN: L, | TCR VAPLHA VBETA DOMAIN; T- |
| | | | | | | | | | H; | CELL RECEPTOR, STRAND SWITCH, |
| | | | | | | | | | | FAB, ANTICLONOTYPIC, 2 |
| | | | | | | | | | | (IMMUNOGLOBULIN/RECEPTOR) |
| 458 | 2gfb | B | 58 | 279 | 0.00034 | | | 67.09 | IMMUNOGLOBULIN IGG2A FAB | |
| | | | | | | | | | FRAGMENT (CNJ206) 2GFB 3 | |
| 458 | 7fab | L | 65 | 260 | 1.5e−11 | | | 58.17 | IMMUNOGLOBULIN | |
| | | | | | | | | | IMMUNOGLOBULIN FAB' NEW | |
| | | | | | | | | | (LAMBDA LIGHT CHAIN) 7FAB 3 | |
| 462 | 1au7 | A | 143 | 289 | 3.4e−33 | | | 105.92 | PIT-1; CHAIN: A, B; DNA; CHAIN: | COMPLEX (DNA-BINDING |
| | | | | | | | | | C, D; | PROTEIN/DNA) GHF-I; COMPLEX |
| | | | | | | | | | | (DNA-BINDING PROTEIN/DNA), |
| | | | | | | | | | | PITUITARY, CPHD, 2 POU DOMAIN. |
| | | | | | | | | | | TRANSCRIPTION FACTOR |
| 462 | 1ocp | | 223 | 289 | 2.8e−22 | | | 84.91 | OCT-3; 1OCP 5 CHAIN: NULL; | DNA-BINDING PROTEIN |
| | | | | | | | | | 1OCP 6 | |
| 462 | 1oct | C | 143 | 290 | 1.3e−40 | | | 120.80 | DNA-BINDING PROTEIN OCT-I | |
| | | | | | | | | | (POU DOMAIN) 1OCT 3 | |
| 462 | 1pou | | 143 | 212 | 5.6e−32 | | | 79.90 | DNA-BINDING PROTEIN OCT-I | |
| | | | | | | | | | (POU-SPECIFIC DOMAIN) (NMR, | |
| | | | | | | | | | 20 STRUCTURES) 1POU 3 | |
| 473 | 1fht | | 30 | 143 | 2.8e−16 | | | 53.05 | U1 SMALL NUCLEAR | RIBONUCLEOPROTEIN U1A117; |
| | | | | | | | | | RIBONUCLEOPROTEIN A; CHAIN: | RIBONUCLEOPROTEIN, RNP |
| | | | | | | | | | NULL; | DOMAIN, SPLICEOSOME |
| 476 | 1c96 | A | 82 | 963 | 0 | | | 253.82 | MITOCHONDRIAL ACONITASE; | LYASE CITRATE HYDRO-LYASE; |
| | | | | | | | | | CHAIN: A; | LYASE, TRICARBOXYLIC ACID |
| | | | | | | | | | | CYCLE, IRON-SULFUR, |
| | | | | | | | | | | MITOCHONDRION, 2 TRANSIT |
| | | | | | | | | | | PEPTIDE, 4FE-4S, 3D-STRUCTURE |
| 477 | 1bab | B | 2 | 140 | 6.8e−55 | | | 179.81 | OXYGEN TRANSPORT | |
| | | | | | | | | | HEMOGLOBIN THIONVILLE | |
| | | | | | | | | | ALPHA CHAIN MUTANT WITH | |
| | | | | | | | | | VAL 1 1BAB 3 REPLACED BY GLU | |
| | | | | | | | | | AND AN ACETYLATED MET | |
| | | | | | | | | | BOUND TO THE 1BAB 4 AMINO | |
| | | | | | | | | | TERMINUS 1BAB 5 | |
| 477 | 1ch4 | A | 2 | 140 | 1.7e−55 | | | 168.27 | MODULE-SUBSTITUTED | OXYGEN TRANSPORT OXYGEN |
| | | | | | | | | | CHIMERA HEMOGLOBIN BETA- | TRANSPORT, CHIMERA PROTEIN, |
| | | | | | | | | | ALPHA; CHAIN: A, B, C, D; | RESPIRATORY PROTEIN, HEME |
| 477 | 1fdh | G | 3 | 140 | 1e−55 | | | 150.09 | OXYGEN TRANSPORT | |
| | | | | | | | | | HEMOGLOBIN (DEOXY, HUMAN | |
| | | | | | | | | | FETAL F═/11$═) 1FDHG 1 1FDHH 2 | |
| 477 | 1hda | B | 3 | 140 | 8.5e−51 | | | 154.60 | OXYGEN TRANSPORT | |
| | | | | | | | | | HEMOGLOBIN (DEOXY) 1HDA 3 | |
| 477 | 1ibe | B | 2 | 140 | 1e−52 | | | 154.97 | HEMOGLOBIN (DEOXY); CHAIN: | OXYGEN TRANSPORT HEME, |
| | | | | | | | | | A, B; | OXYGEN TRANSPORT, |
| | | | | | | | | | | RESPIRATORY PROTEIN, |
| | | | | | | | | | | ERYTHROCYTE |
| 477 | 1qpw | B | 2 | 140 | 1e−52 | | | 163.36 | PORICINE HEMOGLOBIN (ALPHA | OXYGEN TRANSPORT X-RAY |
| | | | | | | | | | SUBUNIT); CHAIN: A, C; | STUDY, PORCINE HEMOGLOBIN, |
| | | | | | | | | | PORICINE HEMOGLOBIN (BETA | ARTIFICIAL HUMAN BLOOD, 2 |
| | | | | | | | | | SUBUNIT); CHAIN: B, D | OXYGEN TRANSPORT |
| 480 | 1b6e | | 66 | 196 | 4.2e−29 | | | 81.88 | CD94; CHAIN: NULL; | NK CELL NK CELL, RECEPTOR, C- |
| | | | | | | | | | | TYPE LECTIN, C-TYPE LECTIN-LIKE, |
| | | | | | | | | | | NKD |
| 480 | 1bj3 | A | 67 | 193 | 3.4e−32 | | | 63.00 | COAGULATION FACTOR IX- | COLLAGEN BINDING PROTEIN IX-BP; |
| | | | | | | | | | BINDING PROTEIN A; CHAIN: A; | IX-BP; COAGULATION FACTOR IX- |
| | | | | | | | | | COAGULATION FACTOR IX- | BINDING, HETERODIMER, VENOM, |
| | | | | | | | | | BINDING PROTEIN B; CHAIN: B; | HABU 2 SNAKE, C-TYPE LECTIN |
| | | | | | | | | | | SUPERFAMILY, COLLAGEN BINDING |
| | | | | | | | | | | PROTEIN |
| 480 | 1byf | A | 77 | 194 | 5.1e−16 | | | 54.78 | POLYANDROCARPA LECTIN; | SUGAR BINDING PROTEIN TC14; C- |
| | | | | | | | | | CHAIN: A, B; | TYPE LECTIN, GALACTOSE- |
| | | | | | | | | | | SPECIFIC, SUGAR BINDING PROTEIN |
| 480 | 1esl | | 78 | 197 | 8.5e−31 | | | 53.21 | CELL ADHESION PROTEIN E- | |
| | | | | | | | | | SELECTIN (LECTIN AND EGF | |
| | | | | | | | | | DOMAINS, RESIDUES 1-157) | |
| | | | | | | | | | 1ESL 3 (FORMERLY KNOWN AS | |
| | | | | | | | | | ELAM-1) 1ESL 4 | |
| 480 | 1htn | | 46 | 196 | 1e−26 | | | 58.22 | TETRANECTIN; CHAIN: NULL; | LECTIN TETRANECTIN, |
| | | | | | | | | | | PLASMINOGEN BINDING, KRINGLE |
| | | | | | | | | | | 4, ALPHA-HELICAL 2 COILED COIL, |
| | | | | | | | | | | C-TYPE LECTIN, CARBOHYDRATE |
| | | | | | | | | | | RECOGNITION DOMAIN |
| 480 | 1hup | | 46 | 194 | 1.7e−23 | | | 53.60 | MANNOSE-BINDING PROTEIN; | C-TYPE LECTIN ALPHA-HELICAL |
| | | | | | | | | | 1HUP 4 CHAIN: NULL; 1HUP 5 | COILED-COIL 1HUP 12 |
| 480 | 1ixx | A | 67 | 193 | 5.1e−30 | | | 60.13 | COAGULATION FACTORS IX/X- | COAGULATION FACTOR BINDING |
| | | | | | | | | | BINDING PROTEIN; CHAIN: A, B, | IX/X-BP COAGULATION FACTOR |
| | | | | | | | | | C, D, E, F; | BINDING, C-TYPE LECTIN, GLA- |
| | | | | | | | | | | DOMAIN 2 BINDING, C-TYPE CRD |
| | | | | | | | | | | MOTIF, LOOP EXCHANGED DIMER |
| 480 | 1ixx | B | 67 | 195 | 8.5e−32 | | | 69.01 | COAGULATION FACTORS IX/X- | COAGULATION FACTOR BINDING |
| | | | | | | | | | BINDING PROTEIN; CHAIN: A, B, | IX/X-BP COAGULATION FACTOR |
| | | | | | | | | | C, D, E, F; | BINDING, C-TYPE LECTIN, GLA- |
| | | | | | | | | | | DOMAIN 2 BINDING, C-TYPE CRD |
| | | | | | | | | | | MOTIF, LOOP EXCHANGED DIMER |
| 480 | 1lit | | 67 | 195 | 1.7e−33 | | | 77.94 | LITHOSTATHINE; CHAIN: NULL | PANCREATIC STONE INHIBITOR |
| | | | | | | | | | | PANCREATIC STONE INHIBITOR, |
| | | | | | | | | | | LECTIN |
| 480 | 1qdd | A | 51 | 195 | 6.8e−35 | | | 84.76 | LITHOSTATHINE; CHAIN: A; | METAL BINDING PROTEIN |
| | | | | | | | | | | PANCREATIC STONE PROTEIN, PSP: |
| | | | | | | | | | | PANCREATIC STONE INHIBITOR, |
| | | | | | | | | | | LITHOSTATHINE |
| 480 | 1rtm | 1 | 36 | 195 | 1e−22 | | | 50.50 | LECTIN MANNOSE-BINDING | |
| | | | | | | | | | PROTEIN A (CLOSTRIPAIN | |
| | | | | | | | | | FRAGMENT) (CL-MBP-A) 1RTM 3 | |
| | | | | | | | | | 1RTM 96 | |
| 480 | 1tn3 | | 62 | 196 | 5.1e−25 | | | 59.09 | TETRANECTIN; CHAIN: NULL; | LECTIN TETRANECTIN, |
| | | | | | | | | | | PLASMINOGEN BINDING, KRINGLE |
| | | | | | | | | | | 4, C-TYPE LECTIN, 2 |
| | | | | | | | | | | CARBOHYDRATE RECOGNITION |
| | | | | | | | | | | DOMAIN |
| 480 | 2msh | A | 77 | 193 | 1.2e−21 | | | 53.42 | LECTIN MANNOSE-BINDING | |
| | | | | | | | | | PROTEIN A (LECTIN DOMAIN) | |
| | | | | | | | | | COMPLEX WITH 2MSB 3 | |
| | | | | | | | | | CALCIUM AND GLYCOPEPTIDE | |
| | | | | | | | | | 2MSB 4 | |
| 489 | 1adq | L | 21 | 235 | 3.4e−84 | | | 313.02 | IGG4 REA; CHAIN: A; RF-AN | COMPLEX |
| | | | | | | | | | IGM/LAMBDA; CHAIN: H, L; | (IMMUNOGLOBULIN/AUTOANTIGEN) |
| | | | | | | | | | | COMPLEX |
| | | | | | | | | | | (IMMUNOGLOBULIN/AUTOANTIGEN), |
| | | | | | | | | | | RHEUMATOID FACTOR 2 AUTO- |
| | | | | | | | | | | ANTIBODY COMPLEX |
| 489 | 1aqk | L | 22 | 235 | 5.1e−83 | | | 285.37 | FAB B7-15A2; CHAIN: L, H; | IMMUNOGLOBULIN HUMAN FAB, |
| | | | | | | | | | | ANTI-TETANUS TOXOID, HIGH |
| | | | | | | | | | | AFFINITY, CRYSTAL 2 PACKING |
| | | | | | | | | | | MOTIF, PROGRAMMING |
| | | | | | | | | | | PROPENSITY TO CRYSTALLIZE, 3 |
| | | | | | | | | | | IMMUNOGLOBULIN |
| 489 | 1bjm | A | 20 | 235 | 6.8e−79 | | | 287.81 | LOC-LAMBDA I TYPE LIGHT- | IMMUNOGLOBULIN BENCE-JONES |
| | | | | | | | | | CHAIN DIMER: 1BJM 6 CHAIN: A, | PROTEIN; 1BJM 8 BENCE JONES, |
| | | | | | | | | | B: 1BJM 7 | ANTIBODY, MULTIPLE |
| | | | | | | | | | | QUATERNARY STRUCTURES 1BJM 13 |
| 489 | 1lil | A | 21 | 235 | 1.2e−80 | | | 311.90 | LAMBDA III BENCE JONES | IMMUNOGLOBULIN |
| | | | | | | | | | PROTEIN CLE: CHAIN: A, B | IMMUNOGLOBULIN, BENCE JONES |
| | | | | | | | | | | PROTEIN |
| 489 | 1mew | W | 20 | 235 | 8.5e−76 | | | 277.24 | IMMUNOGLOBULIN | |
| | | | | | | | | | IMMUNOGLOBULIN | |
| | | | | | | | | | HETEROLOGOUS LIGHT CHAIN | |
| | | | | | | | | | DIMER 1MCW 3 (/MCG$-/WEIR$ | |
| | | | | | | | | | HYBRID) 1MCW 4 | |
| 489 | 1mfb | L | 22 | 232 | 1.4e−96 | | | 225.27 | IMMUNOGLOBULIN FAB | |
| | | | | | | | | | FRAGMENT (MURINE SE155-4) | |
| | | | | | | | | | COMPLEX WITH | |
| | | | | | | | | | HEPTASACCHARIDE 1MFB 3 B: | |
| | | | | | | | | | GAL(1-2)MAN(1-4)RAM(1- | |
| | | | | | | | | | 3)GAL(1-2)[ABE(1-3)]MAN(1- | |
| | | | | | | | | | 4)RAM 1MFB 4 | |
| 489 | 2fb4 | L | 22 | 235 | 8.5e−83 | | | 298.26 | IMMUNOGLOBULIN | |
| | | | | | | | | | IMMUNOGLOBULIN FAB 2FB4 4 | |
| 489 | 2mcg | 1 | 20 | 235 | 8.5e−81 | | | 292.66 | IMMUNOGLOBULIN | |
| | | | | | | | | | IMMUNOGLOBULIN LAMBDA | |
| | | | | | | | | | LIGHT CHAIN DIMER (/MCG$) | |
| | | | | | | | | | 2MCG 3 (TRIGONAL FORM) 2MCG 4 | |
| 489 | 7fab | L | 20 | 231 | 1.4e−89 | | | 252.72 | IMMUNOGLOBULIN | |
| | | | | | | | | | IMMUNOGLOBULIN FAB′ NEW | |
| | | | | | | | | | (LAMBDA LIGHT CHAIN) 7FAB 3 | |
| 489 | 8fab | A | 22 | 231 | 1.7e−81 | | | 313.64 | IMMUNOGLOBULIN FAB | |
| | | | | | | | | | FRAGMENT FROM HUMAN | |
| | | | | | | | | | IMMUNOGLOBULIN IGGI | |
| | | | | | | | | | (LAMBDA, HIL) 8FAB 3 | |

[0450] TABLE 6

| | Position Of the Last | | |
|---|---|---|---|
| | Amino Acid Of Signal | | |
| SEQ ID NO: | Peptide | Maximum Score | Mean Score |
| 246 | 23 | 0.948 | 0.886 |
| 247 | 20 | 0.954 | 0.900 |
| 249 | 19 | 0.992 | 0.946 |
| 252 | 35 | 0.906 | 0.594 |
| 255 | 20 | 0.943 | 0.601 |
| 256 | 18 | 0.895 | 0.587 |
| 257 | 26 | 0.966 | 0.902 |
| 258 | 20 | 0.974 | 0.942 |
| 262 | 44 | 0.967 | 0.702 |
| 273 | 20 | 0.954 | 0.900 |
| 291 | 19 | 0.992 | 0.946 |
| 296 | 26 | 0.965 | 0.852 |
| 309 | 16 | 0.885 | 0.571 |
| 328 | 18 | 0.939 | 0.693 |
| 338 | 18 | 0.988 | 0.897 |
| 340 | 13 | 0.887 | 0.839 |
| 355 | 21 | 0.895 | 0.558 |
| 356 | 18 | 0.906 | 0.614 |
| 357 | 19 | 0.966 | 0.927 |
| 362 | 26 | 0.994 | 0.899 |
| 376 | 35 | 0.906 | 0.594 |
| 379 | 23 | 0.989 | 0.919 |
| 405 | 20 | 0.943 | 0.601 |
| 418 | 18 | 0.895 | 0.587 |
| 426 | 26 | 0.966 | 0.902 |
| 428 | 22 | 0.970 | 0.910 |
| 430 | 14 | 0.941 | 0.861 |
| 432 | 20 | 0.974 | 0.942 |
| 433 | 23 | 0.994 | 0.967 |
| 451 | 26 | 0.978 | 0.885 |
| 457 | 27 | 0.980 | 0.853 |
| 482 | 27 | 0.989 | 0.918 |
| 484 | 18 | 0.996 | 0.953 |
| 489 | 19 | 0.981 | 0.914 |

[0451] TABLE 7

| SEQ ID NO: | Chromosomal location |
|---|---|
| 1 | 6q27 |
| 2 | 4p16.3 |
| 3 | 4p16.3 |
| 4 | 1p21 |
| 5 | 8q13-q22 |
| 6 | 17 |
| 7 | X |
| 8 | 5 |
| 10 | 16 |
| 11 | 10 |
| 12 | 10 |
| 13 | 8pter-p23.3 |
| 15 | 17 |
| 16 | X |
| 17 | 11q23.2 |
| 18 | 19p13.3-p13.2 |
| 19 | 3p21.1 |
| 20 | 10 |
| 21 | 1 |
| 22 | 8 |
| 23 | 16 |
| 24 | 8 |
| 25 | 1 |
| 26 | 22q13.1 |
| 27 | 22q13.1 |
| 28 | 1 |
| 29 | 3 |
| 30 | X |
| 31 | Xq27.3 |
| 32 | Xq27.3 |
| 33 | 4 |
| 34 | 7q35-q36 |
| 35 | 11q12-1q22.2 |
| 36 | 11q23.1-q23.2 |
| 37 | 12 |
| 38 | 2q11.1-q11.2 |
| 39 | 17 |
| 40 | 7q32 |
| 41 | 22q13.2 |
| 42 | 1q42.13-q42.2 |
| 43 | 19q13.3 |
| 44 | 19p12 |
| 45 | 1q23.1-24.3 |
| 46 | 22q11.1-q11.2 |
| 48 | 17 |
| 49 | 8p22 |
| 50 | 22 |
| 51 | 3q23-q24 |
| 52 | 7p22-p21 |
| 53 | 16 |
| 54 | 12 |
| 55 | 21q22.3 |
| 56 | 18q |
| 57 | 6 |
| 60 | 1 |
| 61 | 19 |
| 62 | 14 |
| 63 | 6q15-q16.1 |
| 64 | 13q12.3-q13.1 |
| 65 | 17q21-q22 |
| 66 | 7q11.2 |
| 67 | 12 |
| 68 | 12p13 |
| 69 | 19q13.13-q13.2 |
| 70 | 12 |
| 71 | 19 |
| 72 | 18 |
| 73 | 1p36.13-q31.3 |
| 74 | 14 |
| 75 | 7q21 |
| 76 | 7q21-q22 |
| 78 | 11p11.2-p11.1 |
| 80 | 22q13.31-q13.33 |
| 81 | 3p26-p25 |
| 82 | 2 |
| 84 | 22q13.2-q13.31 |
| 86 | 19 |
| 87 | 22q11.1-q11.2 |
| 88 | 17 |
| 89 | 7q11.21-q11.23 |
| 91 | 9 |
| 92 | 1p35.1-36.12 |
| 93 | 3q13.1-q13.2 |
| 94 | 15 |
| 95 | 19q13.2 |
| 96 | 1 |
| 97 | 20p11.1-11.22 |
| 98 | 19 |
| 100 | 6p12 |
| 101 | 3 |
| 102 | 3 |
| 103 | X |
| 104 | 3q29-qter |
| 105 | 15 |
| 107 | 12 |
| 108 | 20p11.21-12.3 |
| 110 | 5 |
| 111 | 10 |
| 112 | 10 |
| 113 | 6p21.2-p21.3 |
| 114 | 12q15 |
| 115 | 22 |
| 118 | 19 |
| 119 | Xp11.2 |
| 121 | 15 |
| 122 | 3 |
| 123 | 3 |
| 124 | 20 |
| 125 | 9 |
| 126 | 11q13 |
| 127 | 13 |
| 128 | Xq21.1-Xq21.3 |
| 129 | Xq28 |
| 130 | 19p13.1-p12 |
| 131 | 8q22-q23 |
| 133 | 17 |
| 134 | 1p36.3-p36.12 |
| 136 | 11p15.5 |
| 137 | 11p15.5 |
| 138 | 11p15.5 |
| 139 | 10p15-p13 |
| 140 | 3q29 |
| 141 | 11 |
| 142 | 20p12.2-13 |
| 143 | 20q13.3 |
| 144 | 19q13.3-q13.4 |
| 146 | 17 |
| 147 | 12p13.3 |
| 148 | 8q22 |
| 149 | 8q22 |
| 150 | 5 |
| 151 | 9q34 |
| 152 | 7q21 |
| 153 | 7p13-p12 |
| 154 | Xp22.33 |
| 155 | 15 |
| 156 | 14 |
| 158 | 19q13.3 |
| 159 | 19q13.3 |
| 160 | 6 |
| 161 | 14q24.3 |
| 162 | 11 |
| 164 | 16 |
| 165 | 22q13.2-q13.31 |
| 166 | 19 |
| 167 | 11 |
| 168 | 5 |
| 169 | 1p34 |
| 170 | 8q11 |
| 171 | 8q11 |
| 172 | 17 |
| 173 | 19 |
| 176 | 19 |
| 177 | 11 |
| 178 | 7q22-q32 |
| 179 | 16q22.1 |
| 181 | 4q28 |
| 182 | 16p13.3 |
| 183 | 5 |
| 184 | 1 |
| 187 | 3p21.1-p14.3 |
| 188 | 17q21 |
| 189 | 7q21-q22 |
| 190 | 3p13-q26.1 |
| 191 | 17q21.2 |
| 192 | 3q27 |
| 193 | 22q13.2-13.3 |
| 194 | 11q22.2-q22.3 |
| 195 | 12q24.31-q24.32 |
| 196 | 19q13.4 |
| 197 | 17 |
| 198 | 17 |
| 199 | 16 |
| 200 | 20 |
| 201 | 20 |
| 202 | 5 |
| 203 | 17 |
| 204 | 11 |
| 205 | 20q11.2-q12 |
| 206 | 1q24-q41 |
| 207 | 17 |
| 208 | 14 |
| 209 | 11q13 |
| 210 | 6 |
| 211 | 17q21 |
| 212 | 6q21 |
| 214 | 16 |
| 216 | 17 |
| 217 | 6p21.31 |
| 219 | Xp22 |
| 220 | 20 |
| 221 | 3 |
| 222 | 22q13.31-13.32 |
| 223 | 11q12 |
| 224 | 11q13.3 |
| 225 | 11q13.3 |
| 226 | 12 |
| 227 | 17q24-q25 |
| 228 | 20 |
| 229 | 9 |
| 230 | 11 |
| 231 | 15q24-q25 |
| 233 | 19q13.4 |
| 234 | 22q11.2 |
| 235 | 12p13 |
| 236 | 9 |
| 237 | 3p25-p24 |
| 238 | 14q24.3 |
| 240 | 19q13.3 |
| 241 | 20 |
| 242 | 6 |
| 243 | 16q21-q23 |
| 244 | 22q11.1-q11.2 |

[0452] TABLE 8

| | | SEQ ID NO: in USSN |
|---|---|---|
| | | 09/654,935 |
| | | (Numbers to the right of |
| SEQ ID NO: | SEQ ID NO: | the under score correlate to |
| of nucleotide | of polypeptide | sequence identifiers in |
| sequence | sequence | USSN 09/654,935) |
| 1 | 246 | 793_3 |
| 2 | 247 | 793_4 |
| 3 | 248 | 793_5 |
| 4 | 249 | 793_6 |
| 5 | 250 | 793_7 |
| 6 | 251 | 793_9 |
| 7 | 252 | 793_15 |
| 8 | 253 | 793_16 |
| 9 | 254 | 793_17 |
| 10 | 255 | 793_18 |
| 11 | 256 | 793_19 |
| 12 | 257 | 793_20 |
| 13 | 258 | 793_21 |
| 14 | 259 | 793_22 |
| 15 | 260 | 793_25 |
| 16 | 261 | 793_28 |
| 17 | 262 | 793_29 |
| 18 | 263 | 793_30 |
| 19 | 264 | 793_31 |
| 20 | 265 | 793_32 |
| 21 | 266 | 793_33 |
| 22 | 267 | 793_34 |
| 23 | 268 | 793_35 |
| 24 | 269 | 793_36 |
| 25 | 270 | 793_37 |
| 26 | 271 | 793_38 |
| 27 | 272 | 793_39 |
| 28 | 273 | 793_40 |
| 29 | 274 | 793_41 |
| 30 | 275 | 793_42 |
| 31 | 276 | 793_43 |
| 32 | 277 | 793_44 |
| 33 | 278 | 793_47 |
| 34 | 279 | 793_48 |
| 35 | 280 | 793_49 |
| 36 | 281 | 793_50 |
| 37 | 282 | 793_51 |
| 38 | 283 | 793_52 |
| 39 | 284 | 793_55 |
| 40 | 285 | 793_56 |
| 41 | 286 | 793_57 |
| 42 | 287 | 793_58 |
| 43 | 288 | 793_60 |
| 44 | 289 | 793_61 |
| 45 | 290 | 793_62 |
| 46 | 291 | 793_63 |
| 47 | 292 | 793_64 |
| 48 | 293 | 793_65 |
| 49 | 294 | 793_66 |
| 50 | 295 | 793_67 |
| 51 | 296 | 793_68 |
| 52 | 297 | 793_69 |
| 53 | 298 | 793_70 |
| 54 | 299 | 793_71 |
| 55 | 300 | 793_72 |
| 56 | 301 | 793_74 |
| 57 | 302 | 793_75 |
| 58 | 303 | 793_76 |
| 59 | 304 | 793_77 |
| 60 | 305 | 793_78 |
| 61 | 306 | 793_79 |
| 62 | 307 | 793_80 |
| 63 | 308 | 793_81 |
| 64 | 309 | 793_82 |
| 65 | 310 | 793_83 |
| 66 | 311 | 793_85 |
| 67 | 312 | 793_86 |
| 68 | 313 | 793_87 |
| 69 | 314 | 793_88 |
| 70 | 315 | 793_89 |
| 71 | 316 | 793_90 |
| 72 | 317 | 793_91 |
| 73 | 318 | 793_92 |
| 74 | 319 | 793_93 |
| 75 | 320 | 793_94 |
| 76 | 321 | 793_95 |
| 77 | 322 | 793_96 |
| 78 | 323 | 793_97 |
| 79 | 324 | 793_98 |
| 80 | 325 | 793_99 |
| 81 | 326 | 793_101 |
| 82 | 327 | 793_102 |
| 83 | 328 | 793_103 |
| 84 | 329 | 793_104 |
| 85 | 330 | 793_106 |
| 86 | 331 | 793_107 |
| 87 | 332 | 793_108 |
| 88 | 333 | 793_109 |
| 89 | 334 | 793_110 |
| 90 | 335 | 793_111 |
| 91 | 336 | 793_112 |
| 92 | 337 | 793_113 |
| 93 | 338 | 793_114 |
| 94 | 339 | 793_115 |
| 95 | 340 | 793_116 |
| 96 | 341 | 793_117 |
| 97 | 342 | 793_118 |
| 98 | 343 | 793_119 |
| 99 | 344 | 793_120 |
| 100 | 345 | 793_121 |
| 101 | 346 | 793_122 |
| 102 | 347 | 793_123 |
| 103 | 348 | 793_124 |
| 104 | 349 | 793_125 |
| 105 | 350 | 793_126 |
| 106 | 351 | 793_127 |
| 107 | 352 | 793_128 |
| 108 | 353 | 793_129 |
| 109 | 354 | 793_130 |
| 110 | 355 | 793_131 |
| 111 | 356 | 793_132 |
| 112 | 357 | 793_133 |
| 113 | 358 | 793_134 |
| 114 | 359 | 793_135 |
| 115 | 360 | 793_136 |
| 116 | 361 | 793_137 |
| 117 | 362 | 793_138 |
| 118 | 363 | 793_139 |
| 119 | 364 | 793_140 |
| 120 | 365 | 793_141 |
| 121 | 366 | 793_142 |
| 122 | 367 | 793_143 |
| 123 | 368 | 793_144 |
| 124 | 369 | 793_145 |
| 125 | 370 | 793_146 |
| 126 | 371 | 793_147 |
| 127 | 372 | 793_148 |
| 128 | 373 | 793_149 |
| 129 | 374 | 793_150 |
| 130 | 375 | 793_151 |
| 131 | 376 | 793_152 |
| 132 | 377 | 793_153 |
| 133 | 378 | 793_154 |
| 134 | 379 | 793_155 |
| 135 | 380 | 793_156 |
| 136 | 381 | 793_157 |
| 137 | 382 | 793_158 |
| 138 | 383 | 793_159 |
| 139 | 384 | 793_160 |
| 140 | 385 | 793_161 |
| 141 | 386 | 793_162 |
| 142 | 387 | 793_163 |
| 143 | 388 | 793_164 |
| 144 | 389 | 793_165 |
| 145 | 390 | 793_166 |
| 146 | 391 | 793_167 |
| 147 | 392 | 793_168 |
| 148 | 393 | 793_169 |
| 149 | 394 | 793_170 |
| 150 | 395 | 793_171 |
| 151 | 396 | 793_172 |
| 152 | 397 | 793_173 |
| 153 | 398 | 793_174 |
| 154 | 399 | 793_175 |
| 155 | 400 | 793_176 |
| 156 | 401 | 793_177 |
| 157 | 402 | 793_178 |
| 158 | 403 | 793_179 |
| 159 | 404 | 793_180 |
| 160 | 405 | 793_181 |
| 161 | 406 | 793_182 |
| 162 | 407 | 793_183 |
| 163 | 408 | 793_184 |
| 164 | 409 | 793_185 |
| 165 | 410 | 793_186 |
| 166 | 411 | 793_187 |
| 167 | 412 | 793_188 |
| 168 | 413 | 793_189 |
| 169 | 414 | 793_190 |
| 170 | 415 | 793_191 |
| 171 | 416 | 793_192 |
| 172 | 417 | 793_193 |
| 173 | 418 | 793_194 |
| 174 | 419 | 793_195 |
| 175 | 420 | 793_196 |
| 176 | 421 | 793_197 |
| 177 | 422 | 793_198 |
| 178 | 423 | 793_200 |
| 179 | 424 | 793_201 |
| 180 | 425 | 793_202 |
| 181 | 426 | 793_203 |
| 182 | 427 | 793_204 |
| 183 | 428 | 793_205 |
| 184 | 429 | 793_206 |
| 185 | 430 | 793_207 |
| 186 | 431 | 793_209 |
| 187 | 432 | 793_210 |
| 188 | 433 | 793_211 |
| 189 | 434 | 793_212 |
| 190 | 435 | 793_213 |
| 191 | 436 | 793_214 |
| 192 | 437 | 793_215 |
| 193 | 438 | 793_216 |
| 194 | 439 | 793_217 |
| 195 | 440 | 793_218 |
| 196 | 441 | 793_219 |
| 197 | 442 | 793_220 |
| 198 | 443 | 793_221 |
| 199 | 444 | 793_222 |
| 200 | 445 | 793_223 |
| 201 | 446 | 793_224 |
| 202 | 447 | 793_225 |
| 203 | 448 | 793_226 |
| 204 | 449 | 793_227 |
| 205 | 450 | 793_229 |
| 206 | 451 | 793_230 |
| 207 | 452 | 793_231 |
| 208 | 453 | 793_232 |
| 209 | 454 | 793_233 |
| 210 | 455 | 793_234 |
| 211 | 456 | 793_235 |
| 212 | 457 | 793_236 |
| 213 | 458 | 793_237 |
| 214 | 459 | 793_238 |
| 215 | 460 | 793_239 |
| 216 | 461 | 793_240 |
| 217 | 462 | 793_241 |
| 218 | 463 | 793_242 |
| 219 | 464 | 793_244 |
| 220 | 465 | 793_245 |
| 221 | 466 | 793_247 |
| 222 | 467 | 793_248 |
| 223 | 468 | 793_249 |
| 224 | 469 | 793_250 |
| 225 | 470 | 793_251 |
| 226 | 471 | 793_252 |
| 227 | 472 | 793_253 |
| 228 | 473 | 793_254 |
| 229 | 474 | 793_255 |
| 230 | 475 | 793_256 |
| 231 | 476 | 793_257 |
| 232 | 477 | 793_258 |
| 233 | 478 | 793_259 |
| 234 | 479 | 793_260 |
| 235 | 480 | 793_261 |
| 236 | 481 | 793_262 |
| 237 | 482 | 793_263 |
| 238 | 483 | 793_264 |
| 239 | 484 | 793_265 |
| 240 | 485 | 793_266 |
| 241 | 486 | 793_267 |
| 242 | 487 | 793_268 |
| 243 | 488 | 793_269 |
| 244 | 489 | 793_270 |
| 245 | 490 | 793_271 |

What is claimed is:

1. An isolated polynucleotide comprising a nucleotide sequence selected from the group consisting of SEQ ID NO: 1-245, a mature protein coding portion of SEQ ID NO: 1-245, an active domain coding portion of SEQ ID NO: 1-245, and complementary sequences thereof.

2. An isolated polynucleotide encoding a polypeptide with biological activity, wherein said polynucleotide hybridizes to the polynucleotide of claim 1 under stringent hybridization conditions.

3. An isolated polynucleotide encoding a polypeptide with biological activity, wherein said polynucleotide has greater than about 90% sequence identity with the polynucleotide of claim 1.

4. The polynucleotide of claim 1 wherein said polynucleotide is DNA.

5. An isolated polynucleotide of claim 1 wherein said polynucleotide comprises the complementary sequences.

6. A vector comprising the polynucleotide of claim 1.

7. An expression vector comprising the polynucleotide of claim 1.

8. A host cell genetically engineered to comprise the polynucleotide of claim 1.

9. A host cell genetically engineered to comprise the polynucleotide of claim 1 operatively associated with a regulatory sequence that modulates expression of the polynucleotide in the host cell.

10. An isolated polypeptide, wherein the polypeptide is selected from the group consisting of:
(a) a polypeptide encoded by any one of the polynucleotides of claim 1; and
(b) a polypeptide encoded by a polynucleotide hybridizing under stringent conditions with any one of SEQ ID NO: 1-245.

11. A composition comprising the polypeptide of claim 10 and a carrier.

12. An antibody directed against the polypeptide of claim 10.

13. A method for detecting the polynucleotide of claim 1 in a sample, comprising:
a) contacting the sample with a compound that binds to and forms a complex with the polynucleotide of claim 1 for a period sufficient to form the complex; and
b) detecting the complex, so that if a complex is detected, the polynucleotide of claim 1 is detected.

14. A method for detecting the polynucleotide of claim 1 in a sample, comprising:
a) contacting the sample under stringent hybridization conditions with nucleic acid primers that anneal to the polynucleotide of claim 1 under such conditions;
b) amplifying a product comprising at least a portion of the polynucleotide of claim 1; and
c) detecting said product and thereby the polynucleotide of claim 1 in the sample.

15. The method of claim 14, wherein the polynucleotide is an RNA molecule and the method further comprises reverse transcribing an annealed RNA molecule into a cDNA polynucleotide.

16. A method for detecting the polypeptide of claim 10 in a sample, comprising:
a) contacting the sample with a compound that binds to and forms a complex with the polypeptide under conditions and for a period sufficient to form the complex; and
b) detecting formation of the complex, so that if a complex formation is detected, the polypeptide of claim 10 is detected.

17. A method for identifying a compound that binds to the polypeptide of claim 10, comprising:
a) contacting the compound with the polypeptide of claim 10 under conditions sufficient to form a polypeptide/compound complex; and
b) detecting the complex, so that if the polypeptide/compound complex is detected, a compound that binds to the polypeptide of claim 10 is identified.

18. A method for identifying a compound that binds to the polypeptide of claim 10, comprising:
a) contacting the compound with the polypeptide of claim 10, in a cell, under conditions sufficient to form a polypeptide/compound complex, wherein the complex drives expression of a reporter gene sequence in the cell: and
b) detecting the complex by detecting reporter gene sequence expression, so that if the polypeptide/compound complex is detected, a compound that binds to the polypeptide of claim 10 is identified.

19. A method of producing the polypeptide of claim 10, comprising,
a) culturing a host cell comprising a polynucleotide sequence selected from SEQ ID NO: 1-245, a mature protein coding portion of SEQ ID NO: 1-245, an active domain coding portion of SEQ ID NO: 1-245, complementary sequences thereof and a polynucleotide sequence hybridizing under stringent conditions to SEQ ID NO: 1-245, under conditions sufficient to express the polypeptide in said cell; and
b) isolating the polypeptide from the cell culture or cells of step (a).

20. An isolated polypeptide comprising an amino acid sequence selected from the group consisting of any one of the polypeptides SEQ ID NO: 2146-490, the mature protein portion thereof, or the active domain thereof.

21. The polypeptide of claim 20 wherein the polypeptide is provided on a polypeptide array.

22. A collection of polynucleotides, wherein the collection comprising the sequence information of at least one of SEQ ID NO: 1-245.

23. The collection of claim 22, wherein the collection is provided on a nucleic acid array.

24. The collection of claim 23, wherein the array detects full-matches to any one of the polynucleotides in the collection.

25. The collection of claim 23, wherein the array detects mismatches to any one of the polynucleotides in the collection.

26. The collection of claim 22, wherein the collection is provided in a computer-readable format.

27. A method of treatment comprising administering to a mammalian subject in need thereof a therapeutic amount of a composition comprising a polypeptide of claim 10 or 20 and a pharmaceutically acceptable carrier.

28. A method of treatment comprising administering to a mammalian subject in need thereof a therapeutic amount of a composition comprising an antibody that specifically binds to a polypeptide of claim 10 or 20 and a pharmaceutically acceptable carrier.

The application's sequence listing, which the Patent Office published only in electronic form, follows.

SEQUENCE LISTING (490 sequences)

SEQ ID NO: 1 - DNA, 1308 bp, Homo sapiens
  CDS (101)..(1228)
acttcttggtactgattgtttttcccatgcctcaattggtttcttttagggagctacaaatttacgggttcactggtgattgatcttttcatccagcacaatggacagaagtctaaggaacgtccttgtggtttcctttgggttcctgcttctctttacagcctatggaggtctgcagagcctgcagagcagcctgtacagcgaggagggcctgggtgtcacagcgctcagcaccctctatggaggcatgctcctgtcctccatgttcctcccaccgctcctcatcgagaggctgggctgcaaggggaccatcatcctctccatgtgtggctacgtggccttctccgtgggcaacttcttcgccagctggtacactttgatccccacctccatactgctgggactcggggccgccccgctgtggtctgcacagtgcacatacctcacgatcacgggaaacacacatgcagagaaggcgggaaagcgtggcaaagacatggtgaaccagtattttggcatcttcttcctcatattccagtcatccggtgtgtggggcaacttgatctcatcgctggtatttggccagactcccagccaagagacccttccagaagagcagctcacgtcctgtggggccagtgactgcctgatggccaccacaaccaccaacagcacccagaggccctcccagcagctggtctacaccctcctgggcatctacactgggagtggtgtcctggctgtcctgatgatagctgcgttcctccaacccatacgagatgttcagcgggaaagtgaaggagagaagaaatcagtacctttctggtccactttactgtcgactttcaagctatatagagataaacgtctgtgcctcttaattctgctgccgctgtacagtggattgcagcaaggattcctctccagcgaatacacaaggtcctatgtcacctgcaccctgggcatccagttcgtcggctacgtgatgatctgcttctcggccactgacgcgctgtgctccgtgttgtatggaaaggtctcgcagtacacgggcagggctgtgctgtacgtgctgggcgcggtgacccacgtgtcctgcatgattgccctactgctgtggagacctcgtgctgaccatctggcagtggtcttcgtattctctggcctgtggggcgtggcagatgccgctgcagacacaaaacaatgctctctacggcgttctgtttgagaagaacaagaaactgcttcgcaattaccgctgttggaagcctgggttcgtcatgcttgggtacagagttttgtggtggg

SEQ ID NO: 2 - DNA, 3817 bp, Homo sapiens
  CDS (55)..(2268)
cgccggggaggtggagcacgagcgcacgtgttaggaacctagaaagattgtacaatgaatggtgattctcgtgctgcggtggtgacctcaccacccccgaccacagcccctcacaaggagaggtacttcgaccgagtagatgagaacaacccagagtacttgagggagaggaacatggcaccagaccttcgccaggacttcaacatgatggagcaaaagaagagggtgtccatgattctgcaaagccctgctttctgtgaagaattggaatcaatgatacaggagcaatttaagaaggggaagaaccccacaggcctattggcattacagcagattgcagattttatgaccacgaatgtaccaaatgtctacccagcagctccgcaaggagggatggctgccttaaacatgagtcttggtatggtgactcctgtgaacgatcttagaggatctgattctattgcgtatgacaaaggagagaagttattacggtgtaaattggcagcgttttatagactagcagatctctttgggtggtctcagcttatctacaatcatatcacaaccagagtgaactccgagcaggaacacttcctcattgtcccttttgggcttctttacagtgaagtgactgcatccagtttggttaagatcaatctacaaggagatatagtagatcgtggaagcactaatctgggagtgaatcaggccggcttcaccttacactctgcaatttatgctgcacgcccggacgtgaagtgcgtcgtgcacattcacaccccagcaggggctgcggtctctgcaatgaaatgtggcctcttgccaatctccccggaggcgctttcccttggagaagtggcttatcatgactaccatggcattctggttgatgaagaggaaaaagttttgattcagaaaaatctggggcctaaaagcaaggttcttattctccggaaccatgggctcgtgtcagttggagagagcgttgaggaggccttctattacatccataaccttgtggttgcctgtgagatccaggttcgaactctggccagtgcaggaggaccagacaacttagtcctgctgaatcctgagaagtacaaagccaagtcccgttccccagggtctccggtaggggaaggcactggatcgcctcccaagtggcagattggtgagcaggaatttgaagccctcatgcggatgctcgataatctgggctacagaactggctacccttatcgataccctgctctgagagagaagtctaaaaaatacagcgatgtggaggttcctgctagtgtcacaggttactcctttgctagtgacggtgattcgggcacttgctccccactcagacacagttttcagaagcagcagcgggagaagacaagatggctgaactctggccggggcgacgaagcttccgaggaatggcagaatggaagcagtcccaagtcgaagactaagtggactaaagaggatggacatagaacttccacctctgctgtccctaacctgtttgttccattgaacactaacccaaaagaggtccaggagatgaggaacaagatccgagagcagaatttacaggacattaagacggctggccctcagtcccaggttttgtgtggtgtagtgatggacaggagcctcgtccagggagagctggtgacggcctccaaggccatcattgaaaaggagtaccagccccacgtcattgtgagcaccacgggccccaaccccttcaccacactcacagaccgtgagctggaggagtaccgcagggaggtggagaggaagcagaagggctctgaagagaatctggacgaggctagagaacagaaagaaaagagtcctccagaccagcctgcggtcccccacccgcctcccagcactcccatcaagctggaggaagaccttgtgccggagccgactactggagatgacagtgatgctgccacctttaagccaactctccccgatctgtcccctgatgaaccttcagaagcactcggcttcccaatgttagagaaggaggaggaagcccatagacccccaagccccactgaggcccctactgaggccagccccgagccagccccagacccagccccggtggctgaagaggctgccccctcagctgtcgaggagggggccgccgcggaccctggcagcgatgggtctccaggcaagtccccgtccaaaaagaagaagaagttccgtaccccgtcctttctgaagaagagcaagaagaagagtgactcctgaaagccctgcgctaacactgtcctgtccggagcgaccctggctctgccagcgtccccggccacgtctgtgctctgtccttgtgtaatggaatgcaaaaaagccaagccctccgcctagaggtcccctcacgtgaccagccccgtgtagccccgggctgacccagtgtgtgctcagcagccccaccccaccctgccccttgtcctctcagagcctcagcttctgggggagacatgctctccccacaggggggaggcactaagtcatggtcctggctggaaggtactgaaggcttctgcagctttggctgcacgtcaccctcctgagcctcacctttcctgccgtccctcctgttgtgaaatcaccacattctgtctctgcttggcttcccctccaccctaaagtctcaggtgacggactcagactcctggcttcatgtggcattctctctgctcagtgatctcacttaaatctatatacaaagccttggtcccgtgaaaacactcgtgtgcccaccagcggccttgaagaggcaggtctgggccagatgctgggcaggaaaccccagcggcagatgggcctgtgtgcacccaacgtgatgctatgcatgtctgaccgacgatccctcgaccagaatcagattcaggagctcagtttctttttcacttgggtctctggattcctgtcatagggaaggtatatcaggaggggaagaggcctttctagaattttctttgagcaggtttacaatttagcttacatttttcgactgtgaacgtgaataggctgctttttgctttcttctttccagaccccacagtagagcacttttcacttatttgggggaggcttcaggggactgttctcaccttaactcagccagaaagatgccctagttgtgatcaaaggtaactcgaggtggagggtagccctggggcccctcgacatcaccgtcattgatggagcctgaaccgtgtgctcctcggcagatgctgttgttgttacttccctccaagaggctggaaaagggctcagagctgctgagcaggaaccggagggtgacccatttcaggaggtgccggtaccagcctgactaggtacaggcaagcttgtgtgggcccaacaggcccttggtagagctggtgccagatgtgggctcagatcctgggcatgatgggccgagccacctcggatcccactgattggccagccgagcgagaaccaggctgctgcatggcactgaccgccgcttccagcttcctctgagccgcagggcctgctacgcgggcaagcgtgctgcctctcttctgtgtcgttttgttgccaaggcagaatgaaaagtccttaaccgtggactcttcctttatcccctcctttaccccacatatgcaatgacttttaattttcacttttgtagtttaatcctttgtattacaacatgaaatatagttgcatatatggacaccgacttgggaggacaggtcctgaatgtcctttctccagtgtaacatgttttactcacaaataaaattctttcagcaaaaaaaaaaaa

SEQ ID NO: 3 - DNA, 3905 bp, Homo sapiens
  CDS (50)..(2356)
gggaggtggagcacgagcgcacgtgttaggaacctagaaagattgtacaatgaatggtgattctcgtgctgcggtggtgacctcaccacccccgaccacagcccctcacaaggagaggtacttcgaccgagtagatgagaacaacccagagtacttgagggagaggaacatggcaccagaccttcgccaggacttcaacatgatggagcaaaagaagagggtgtccatgattctgcaaagccctgctttctgtgaagaattggaatcaatgatacaggagcaatttaagaaggggaagaaccccacaggcctattggcattacagcagattgcagattttatgaccacgaatgtaccaaatgtctacccagcagctccgcaaggagggatggctgccttaaacatgagtcttggtatggtgactcctgtgaacgatcttagaggatctgattctattgcgtatgacaaaggagagaagttattacggtgtaaattggcagcgttttatagactagcagatctctttgggtggtctcagcttatctacaatcatatcacaaccagagtgaactccgagcaggaacacttcctcattgtcccttttgggcttctttacagtgaagtgactgcatccagtttggttaagatcaatctacaaggagatatagtagatcgtggaagcactaatctgggagtgaatcaggccggcttcaccttacactctgcaatttatgctgcacgcccggacgtgaagtgcgtcgtgcacattcacaccccagcaggggctgcggtctctgcaatgaaatgtggcctcttgccaatctccccggaggcgctttcccttggagaagtggcttatcatgactaccatggcattctggttgatgaagaggaaaaagttttgattcagaaaaatctggggcctaaaagcaaggttcttattctccggaaccatgggctcgtgtcagttggagagagcgttgaggaggccttctattacatccataaccttgtggttgcctgtgagatccaggttcgaactctggccagtgcaggaggaccagacaacttagtcctgctgaatcctgagaagtacaaagccaagtcccgttccccagggtctccggtaggggaaggcactggatcgcctcccaagtggcagattggtgagcaggaatttgaagccctcatgcggatgctcgataatctgggctacagaactggctacccttatcgataccctgctctgagagagaagtctaaaaaatacagcgatgtggaggttcctgctagtgtcacaggttactcctttgctagtgacggtgattcgggcacttgctccccactcagacacagttttcagaagcagcagcgggagaagacaagatggctgaactctggccggggcgacgaagcttccgaggaatggcagaatggaagcagtcccaagtcgaagactaaggtgtggacgaacattacacacgatcacgtgaaacccttgctgcagtctctctcgtccggtgtctgcgtgccaagctgtattaccaactgcttgtggactaaagaggatggacatagaacttccacctctgctgtccctaacctgtttgttccattgaacactaacccaaaagaggtccaggagatgaggaacaagatccgagagcagaatttacaggacattaagacggctggccctcagtcccaggttttgtgtggtgtagtgatggacaggagcctcgtccagggagagctggtgacggcctccaaggccatcattgaaaaggagtaccagccccacgtcattgtgagcaccacgggccccaaccccttcaccacactcacagaccgtgagctggaggagtaccgcagggaggtggagaggaagcagaagggctctgaagagaatctggacgaggctagagaacagaaagaaaagagtcctccagaccagcctgcggtcccccacccgcctcccagcactcccatcaagctggaggaagaccttgtgccggagccgactactggagatgacagtgatgctgccacctttaagccaactctccccgatctgtcccctgatgaaccttcagaagcactcggcttcccaatgttagagaaggaggaggaagcccatagacccccaagccccactgaggcccctactgaggccagccccgagccagccccagacccagccccggtggctgaagaggctgccccctcagctgtcgaggagggggccgccgcggaccctggcagcgatgggtctccaggcaagtccccgtccaaaaagaagaagaagttccgtaccccgtcctttctgaagaagagcaagaagaagagtgactcctgaaagccctgcgctaacactgtcctgtccggagcgaccctggctctgccagcgtccccggccacgtctgtgctctgtccttgtgtaatggaatgcaaaaaagccaagccctccgcctagaggtcccctcacgtgaccagccccgtgtagccccgggctgacccagtgtgtgctcagcagccccaccccaccctgccccttgtcctctcagagcctcagcttctgggggagacatgctctccccacaggggggaggcactaagtcatggtcctggctggaaggtactgaaggcttctgcagctttggctgcacgtcaccctcctgagcctcacctttcctgccgtccctcctgttgtgaaatcaccacattctgtctctgcttggcttcccctccaccctaaagtctcaggtgacggactcagactcctggcttcatgtggcattctctctgctcagtgatctcacttaaatctatatacaaagccttggtcccgtgaaaacactcgtgtgcccaccagcggccttgaagaggcaggtctgggccagatgctgggcaggaaaccccagcggcagatgggcctgtgtgcacccaacgtgatgctatgcatgtctgaccgacgatccctcgaccagaatcagattcaggagctcagtttctttttcacttgggtctctggattcctgtcatagggaaggtatatcaggaggggaagaggcctttctagaattttctttgagcaggtttacaatttagcttacatttttcgactgtgaacgtgaataggctgctttttgctttcttctttccagaccccacagtagagcacttttcacttatttgggggaggcttcaggggactgttctcaccttaactcagccagaaagatgccctagttgtgatcaaaggtaactcgaggtggagggtagccctggggcccctcgacatcaccgtcattgatggagcctgaaccgtgtgctcctcggcagatgctgttgttgttacttccctccaagaggctggaaaagggctcagagctgctgagcaggaaccggagggtgacccatttcaggaggtgccggtaccagcctgactaggtacaggcaagcttgtgtgggcccaacaggcccttggtagagctggtgccagatgtgggctcagatcctgggcatgatgggccgagccacctcggatcccactgattggccagccgagcgagaaccaggctgctgcatggcactgaccgccgcttccagcttcctctgagccgcagggcctgctacgcgggcaagcgtgctgcctctcttctgtgtcgttttgttgccaaggcagaatgaaaagtccttaaccgtggactcttcctttatcccctcctttaccccacatatgcaatgacttttaattttcacttttgtagtttaatcctttgtattacaacatgaaatatagttgcatatatggacaccgacttgggaggacaggtcctgaatgtcctttctccagtgtaacatgttttactcacaaataaaattctttcagcaaaaaaaaaaaa

SEQ ID NO: 4 - DNA, 1255 bp, Homo sapiens
  CDS (32)..(1255)
cacgatttctgtttttgcttctccaaggaaaatggcagctcccgagcagccgcttgcgatatcaaggggatgcacgagctcctcctcgctttccccgcctcggggcgaccgaacccttctggtcaggcacctgccggctgagcttactgctgaggagaaagaggacttgctgaagtacttcggggctcagtctgtgcgggtcctgtcagataaggggcgactgaaacatacagcttttgccacattccctaatgaaaaagcagctataaaggcattgacaagactccatcaactgaaacttttaggtcatactttagtcgttgaatttgcaaaagagcaagatcgagttcactccccatgtcccacttcaggttctgaaaaaaaaaaaaggtctgatgaccctgtcgaagatgataaagaaaaaaaagaacttggttatttaacagtagaaaatggaattgcaccaaaccatgggctgacttttcctttaaattcatgcctcaagtatatgtacccaccaccttccagcacaatcctagcaaacattgtaaatgccttggcaagcgtgcctaagttctatgtacaggtccttcatcttatgaataaaatgaatttgcccacaccttttggaccaattactgcgcgacctcccatgtatgaagactatatgccattgcatgcacctcttccacccacatctcctcagccacctgaggaacctcctttgccagacgaggatgaggaattatctagtgaagaatcagaatatgaaagcactgatgatgaggaccgacagagaatgaacaaattaatggaactagcaaatcttcagcccaaaagacctaaaacaataaagcagcgccatgtgagaaaaaagagaaaaataaaggatatgttgaatacacctttgtgtccttcacacagcagtttacatccagtgctgttaccttcagatgtatttgaccaaccacaacctgtaggtaacaaaagaattgaattccatatatctaccgacatgccagctgcatttaagaaagatttagaaaaggaacaaaattgtgaggaaaaaaatcatgatttacctgctactgaagttgatgcatccaatataggatttggaaaaatcttccccaaacctaatttggacatcacagaggagattaaagaagactctgatgaaatgccttcagaatgtatttctagaagggaattggaaaagggcagaatttctagagaaggtaatgtcacgaaataa

SEQ ID NO: 5 - DNA, 2286 bp, Homo sapiens
  CDS (609)..(1391)
aggcaaacaaacgagttctttccagcctctgtaaccggatcgctagagcgaaataaactcgcacaagtgtccagagatcgtagccagacagccagcctgcgcttgaacgaacttttaagtgaggctgcaagagccgccgggatgtagattttagttcgtggccaagcacaactacgacgatcctgtccctgccccaccccatccccaagaatgcatggaggaaggagagaggaagcaggtgagggccgcctgcatttctgcacgtcggcgccggttagaaaccctgcagttttgagagagaagaagaggagatggaggggccaggagccacgactcccgggagagcgcagggaggggcgtgggtgccccttcgcccacctccgcccccgtcacctcgacagctgtcccgctcttggaattcattggcttcctctacccggcctcccaaacaccaccccaatctagtttagccccccgccccaccctcgctgacctaataaggccatgcaagtgtgcgggggagctacataaaagcgcgggctcgcgccgactctgcaccacgcaggggaagagaaagcaggagccgtccagcacggaggaaggcgaccatggccaaggagtggggctacgccagtcacaacggtcctgaccactggcatgaacttttcccaaatgccaagggggaaaaccagtcgcccgttgagctgcatactaaagacatcaggcatgacccttctctgcagccatggtctgtgtcttatgatggtggctctgccaagaccatcctgaataatgggaagacctgccgagttgtatttgatgatacttatgataggtcaatgctgagagggggtcctctccctggaccctaccgacttcgccagtttcatcttcactggggctcttcggatgatcatggctctgagcacaccgtggatggagtcaagtatgcagcggagcttcatttggttcactggaacccgaagtataacacttttaaagaagccctgaagcagcgcgatgggatcgctgtgattggcatttttctgaagataggacatgagaatggcgagttccagattttccttgatgcattggacaagattaagacaaagggcaaggaggcgcccttcacaaagtttgacccatcctgcctgttcccggcatgccgggactactggacctaccagggctcattcaccacgccgccctgcgaggaatgcattgtgtggctgctgctgaaggagcccatgaccgtgagctctgaccagatggccaagctgcggagcctcctctccagtgctgagaacgagcccccagtgcctcttgtgagcaactggcgacctccacagcctatcaataacagggtggtgagagcttccttcaaatgaggctgctggatcttgccctcttcaggaaaggaaacctaccattggagagcttggttccttgcctccttctggtgctccttactccaagtctatttcatttttccacactgagcaatgaatgtgagagatgtggtcaccaagatctaagttacttgttgaaagaaagttactttcgacaagatctaatatgaaagcatagatttcacatttgatctctgtaataatcatctttcctataaaagtagcatttttggtaaagtttcaaagaagaagaaacagagatggaagagtaaagatatttttaaaatggctagctattgggcaccagtttttctgttatctaaaatttcacacaacttcattgtttttatttttatattatgagttgtccatcttaaagaaatatgagtaattctacatgtagtagaggtgtatgaagatcatataacaattaaacataagccagaaattaaaatgactatagacagcaagaattgagctaataatatgttttaactcttaacaccagcaagaagtcagtcatttattgaagttttagctactaagattacttggttttgattaccagtgaaaagaaaacacaatacaatcaggagttttcaaatttttgattcagtatttgaatttcttcttcataaatgtagttgaatttatcctagtatttttctttacctgaagtagggccatttatttttaatttcactacatttttctttgcatgattattaaaataaaaactgcctctgttgtgtttctcactggaggctggaatgaatgatcactagaacacaaaagagtgaatgatgacacttgaagtcaaagcagttgtactgatcaccagaaccaataaagacataaatggaaaaaaaaaaaa

SEQ ID NO: 6 - DNA, 1248 bp, Homo sapiens
  CDS (346)..(1149)
gctcccgggcatttaaaggggacgcggcggctgcccgggggggatgaggggcaagtggaggggacggctcagacgcacatcatcctcagtccctcgggactggagggactcgtgagccggagcccagaaatccgggggtggataagacaccgcgtcccctccaattcccgtaagcaccccttgctccatcctgcgccccaatacctcagctagcccccttccccacttcttacactccaaactcagccgggacagacctctgctgccgccgcccccacgaacgtgtgacgacggctggaggccaacagagtccctacaggtggtgctcacggtaatgcaccgacaatgagtggctgttttccagtttctggcctccgctgcctatctagggacggcaggatggccgcgcagggcgcgccgcgcttcctcctgaccttcgacttcgacgagactatcgtggacgaaaacagcgacgattcgatcgtgcgcgccgcgccgggccagcggctcccggagagcctgcgagccacctaccgcgagggcttctacaacgagtacatgcagcgcgtcttcaagtacctgggcgagcagggcgtgcggccgcgggacctgagcgccatctacgaagccatccctttgtcgccaggcatgagcgacctgctgcagtttgtggcaaaacagggcgcctgcttcgaggtgattctcatctccgatgccaacacctttggcgtggagagctcgctgcgcgccgccggccaccacagcctgttccgccgcatcctcagcaacccgtcggggccggatgcgcggggactgctggctctgcggccgttccacacacacagctgcgcgcgctgccccgccaacatgtgcaagcacaaggtgctcagcgactacctgcgcgagcgggcccacgacggcgtgcacttcgagcgcctcttctacgtgggcgacggcgccaacgacttctgccccatggggctgctggcgggcggcgacgtggccttcccgcgccgcggctaccccatgcaccgcctcattcaggaggcccagaaggccgagcccagctcgttccgcgccagcgtggtgccctgggaaacggctgcagatgtgcgcctccacctgcaacaggtgctgaagtcgtgctgagtctggccgcctgcaggggggtacccgggccaacggcggagggggcggggaagggagattcggcaaagacagctttactactcccttaaaaaaaaaaaa

SEQ ID NO: 7 - DNA, 2338 bp, Homo sapiens
  CDS (154)..(1308)
ctcctggcggccaggcctggggactctctgccgcgggacggcgcctcgcgttccgccgtggcagtggccgtggccagaacgtccacgcgcggtcgtccaccgccggatctcgctccagcgcccgtggtccagcgtgtagggagccgatcgcccatggagggtctgggccgctcgtgcctgtggctgcgtcgggagctgtcgcccccgcggccgcggctcctgctcctggactgccgcagccgcgagctgtacgagtcggcgcgcatcggtggggcgctgagcgtggccctgccggcgctcctgctgcgccgcctgcggaggggcagcctgtcggtgcgcgcgctcctgcctgggccgccgctgcagccgcccccgcctgcccccgtgctcctgtacgaccagggcgggggccggcgccggcgcggggaggccgaggccgaggccgaggagtgggaggccgagtcggtgctgggcaccctgctgcagaagctgcgagaggaaggctacctggcctactacctccagggaggcttcagcagattccaggccgagtgccctcacctgtgtgagaccagccttgctggccgtgccggctccagcatggcgccggtgcccggtccagtgcccgtggtggggttgggcagcctgtgcctgggctccgactgctctgatgcggaatccgaggctgaccgcgactccatgagctgtggcctggattcggagggtgccacacccccaccagtggggctgcgggcatccttccctgtccagatcctgcccaacctctatctgggcagtgcccgggattccgccaatttggagagcctggccaaactgggcatccgctacatcctcaatgtcacccccaacctcccaaacttcttcgagaagaatggtgactttcactacaagcagatccccatctccgaccactggagccagaacctgtcgcggttctttccggaggccattgagttcattgatgaggccttgtcccagaactgcggggtgctcgtccactgcttggcgggggtcagccgttctgtcaccgtcactgtggcctacctcatgcagaagctccacctctctctcaacgatgcctatgacctggtcaagaggaagaagtctaacatctcccccaacttcaacttcatggggcagttgctggactttgagcgcagcttgcggctggaggagcgccactcgcaggagcagggcagtggggggcaggcatctgcggcctccaacccgccctccttcttcaccacccccaccagtgatggcgccttcgagctggcccccacctagggccccgtggccggcaggccggcccctgccccacccccacccacgggtgtccctgcccactcgtgtggcaagggaggggagggcaggagggctcggcctgagcagggtgctggggggagagcgcaatacctcacgcgggctgccgtcctaatcaacgtgcctatggcgggaccacgctcggagcctgcctcttctgcgactgttactttttctttgcgggatgggggtgggggttccctctccaggtggttgtccaggcccaggtcccggccctgggtgctcagccagctcggctaggccctgcgcctccctgcgcttcccccttcaggaagggtgtgtgccacctcgttgcactggatcccagtggctgcttgggggagaggcgtttgccatcactggtgttgtcacctccctgtttctccaccaagggcttgggcctctcggggctggggcctcccaggggatggggacccagaggtgcagtggccgcccacatccatggcctaggagctactgggcaggttcccggccacacatctggtgggctgttttgttttttttttttcctcttcccccagatgtcttgacgggatcactggggctctttgtgagtgagggtggccaaactaccgccggaggagatggggtctcagagcgagagctgcggagggggaggggaagaagaaggcctcacttttgctgctgcggggcccacacagccgctgctactttggggggtggggaaggggccaagctgcagacacacacagtcattcatttctgtccacacccctgtgggtggcgggtgtgcgtgtgtgtgcttgtgtgtgcgcacgtgtcggcgctcacacacacatgctagcccactgatgcacccagcccagggctggcagtctttgcagcgtggggccgtctcaccctggagcctggagaggatctatgcttgtttgtttttgtaatccatatcatagttgctttctttaattgttccttctgaataaacagtttatttaagataaaaaaaaaaaaa

SEQ ID NO: 8 - DNA, 1037 bp, Homo sapiens
  CDS (147)..(767)
ctagtcccccgcgcggccccttattcgctccgacaaggtacaaaaaggctctggacggcggcgtggtaggaggacgggagcgggggcgggaagttccctgaaggagcgagacagggagggacagggcagaggaggagaggaaggcgatgcgacggacaggcgcacccgctcaggctgactctcgggggcgaggtcgagccaggggcggctgccctgggggcgaggcgacgctgtctcaacctccacctcgcggcggaacccgaggacaggagcctcagatgaaagaaacaatcatgaaccaggaaaaactcgccaaactgcaggcacaagtgcgcattggtgggaaaggaactgctcgcagaaagaagaaggtggttcatagaacagccacagcagatgacaaaaaacttcagttctccttaaagaagttaggggtaaacaatatctctggtattgaagaggtgaatatgtttacaaaccaaggaacagtgatccactttaacaaccctaaagttcaggcatctctggcagcgaacactttcaccattacaggccatgctgagacgaagcagctgacagaaatgctacccagcatcttaaaccagcttggtgcggatagtctgactagtttaaggagactggccgaagctctgcccaaacaatctgtggatggaaaagcaccacttgctactggagaggatgatgatgatgaagttccagatcttgtggagaattttgatgaggcttccaagaatgaggcaaactgaattgagtcaacttctgaagataaaacctgaagaagttactgggagctgctattttatattatgactgctttttaagaaatttttgtttatggatctgataaaatctagatctctaatatttttaagcccaagccccttggacactgcagctcttttcagtttttgcttatacacaattcattctttgcagctaattaagccgaagaagcctgggaatcaagtttgaaacaaagattaataaagttctttgcctagtaaaaaaaaaaaaaa

SEQ ID NO: 9 - DNA, 1138 bp, Homo sapiens
  CDS (181)..(489)
tgttactgtaaaatagttttcatctcacccctcctaatcatactcccactttcctgtttgtgtggtggagctgctgttttttcctttacatgaattaaccaaatgaattttgtgtcattgtttttggggcttatatttttaaaacatagaaattgccttttgttcatttgaaaagtaagtatgttgtatctgaaaaagggctctgcctctgctctccctcgcttccttgtaaccaatctccaaacgaatctctcctggcaccgcccccttccttatatagggtcactgtccccggggccacctctgcctccaccctgctgtcaccactgccctgggccaaggcacccaggactcccagaaagcgcgagagccagcaagaaggccccactcagccttgagactggtggtcacacctccctgtcagagtcgcctgctgggctgaaggggcaatggattgtcattgttgaaattgtttggctcaggttataaggaggaacttgggaagtagaaagtgacttgaccatgtgcatccttggtagcttcctgtaactaacaaatggaacagagagcacacccccgccccgccccaccccaagcagatgttcccgtcagcgctgccctgagtcagtcggtcccccgtttctgctctcctcccttttgtgttcctgctcacttcaagcttcttccatggactttccagggcacagtcatctctagcccccaaatcatctcttcatcctctgtgtgtgcatttttttaaccaaatgaaatagacaagaaagtcatactttggggcagcagaatttctaatttagtagaatcactgtatagagatagatgttgatatatatgtttgtgtatatatatcaaaccaaattggataggagaagtatagctttacagatgaggagaaggagctctttagaggtcggagtcaagactggtgtcttggacgtgcatgggctgtgtcccaggccactccgcacacatggggctgaggcgtggcgccgggcccttgtcatccacctcaccacggcagagccagcaggccctgtaaggtgctgctgctgtctcactgggtcccagcttcaagcgcatcagtgggtgacgggggcaacaaatcagagtgactggaagt

SEQ ID NO: 10 - DNA, 1189 bp, Homo sapiens
  CDS (67)..(615)
gaatctctgaaagactgaccgactgactctgacaggatccggggctgagggaaggaggcggcggccatggagttgggcgagctgctctacaacaagtctgagtacatcgagacggcatctgggaacaaagtcagtcgccagtcagtgttgtgtggaagccagaacatcgttctcaatggcaagaccattgtgatgaatgactgtattatccgaggggatctggcaaatgtaagagttggacgtcattgtgttgtgaaaagtcgtagtgtcataaggccaccattcaagaagttcagcaaaggtgttgcattctttcctttacatattggagaccatgtctttattgaggaagattgtgtggtcaacgcagcacagattggttcctatgttcatgttgggaagaactgtgtgattgggcgccgatgtgtgttgaaagactgctgcaaaattcttgacaacacagtattacctccggaaactgtggttccaccattcactgtcttctcaggctgcccaggactcttctcaggggagctcccggagtgcactcaggagctgatgattgacgtcaccaagagctactaccagaagtttttgcccctgacgcaagtctagcatctctgcctcatgtcttgaatctgcttgagctctaagatgaacctggggacaaagtgagccagtcagcacctacaaagagcttttgtgtctttgacatctaccaccctcctccttttaaaaaatttctttagaatttctcaatcttcaaggctctaagtgcttaagaattcactaacagacagaccatctggaggagctgtcttcaaatgctgtgcttacaccttatctatgaacagtcactttgtaccattatctgtggaacacagaatcatctgttcccaacactccagccccttggtcctgtggatggctggatcccgcctgaaacggacctgcagagcagcagcacccttccggtgtggaggctatgtagctggtgcgctgctcacggccattcactgcccatgctgagcgcctctcacacaggtaatgcccagcttttctgctgctaacacatttggccagttgttgcagttgctcatcatcttgggaaaggtgtttgtgacttttcagagcccagattcctgttgtctattaaaacttgaagggaggggtgaataaaaaaaaaaaa

SEQ ID NO: 11 - DNA, 4637 bp, Homo sapiens
  CDS (21)..(4064)
accggtccggaattcccgggatgctggggctaggcttccggggctctgcagtcctcggcgtgtgctggcagcttcggagcccaccgagccgggcggctaggatgatgaaccggacgacccccgaccaggagctggcgccagcgtcggagcccgtgtgggagcggccgtggtcgatggaggagatccgcaggagcagccagagctggtcgctggcggccgacgcgggcctactacagtttctacaggaattctcacagcaaactatctctaggacccatgaaatcaagaaacaagtggacggactaatccgggaaaccaaagccacagattgtcgcctgcataatgtcttcaatgacttccttatgctctctaatacccagttcatagagaatcgtgtatatgatgaagaagtggaggagccagtactcaaggctgaggcagaaaaaacagagcaggagaagacacgagagcagaaagaagtagatctcattcctaaagtccaggaggctgtgaactatggcttacaagtattggacagtgcctttgagcaacttgatatcaaagcaggaaactcagactccgaggaagatgatgctaatgggcgggtggaactgatccttgaaccaaaggatctatacattgatcgtcctttaccatatctcattgggtcaaagctgttcatggaacaagaagatgtaggtcttggagagctgtccagtgaagaaggctctgtaggcagtgatcgtggcagtattgtggacactgaggaagagaaagaagaggaggagtcagatgaagattttgcccatcacagtgacaatgaacaaaaccagcacaccacacaaatgagtgatgaggaagaggatgatgatggctgtgacctttttgctgactctgagaaggaggaggaagatattgaggacattgaagaaaatactagacctaaaagaagcagacctacatcgtttgcagatgagctggctgcccgcatcaagggggatgccatgggtcgagtggacgaggagccgacaaccttaccctcaggagaagcaaaacctcggaagacactcaaagagaagaaggaaaggagaactccttcagacgatgaagaggataacttattcgcaccccccaagctgaccgacgaggacttctcgccatttggctctggaggtggcctgttcagtggcggcaaggggctatttgatgatgaggacgaggagagtgacctcttcacggaagccccccaggatcggcaagctggagcctctgttaaggaggagtcttcatcatccaaacctggaaagaaaatcccagcaggagctgtttctgtatttttaggagacacggatgtgtttggtgctgcctccgttccatcaatgaaggagccacagaagcctgagcagcccactccaaggaaaagcccctatggtccccctcccactggcctctttgatgatgatgatggtgatgatgatgacgactttttctcggcaccccacagcaaaccttctaaaacaggcaaagtccaatccactgccgatatctttggtgacgaagaaggagatctgttcaaagaaaaagccgtagcatcgccagaagccactgtgagtcagacagatgaaaataaagcaagagcagaaaaaaaggttaccttatcttccagcaaaaatctcaagccctcatcagaaacaaagactcaaaaaggcttattttcagatgaggaggactctgaggatttgttttcttctcaaagtgcgagtaacttaaaaggtgcatctctgctgcctggcaagctccccacgtcggtttccctgtttgatgatgaagatgaagaggataatctttttgggggtacagctgctaagaagcagacattgtctctacaagctcagagagaagagaaagcaaaagcctccgagctctccaaaaagaaagcatctgccctgttgttcagcagtgatgaggaggaccagtggaatattcctgcttcacagacccacttagcatctgacagcaggtctaaaggagaacccagggattctgggaccctccagagccaggaggccaaggctgtgaaaaagaccagtctctttgaggaagacgaagaagatgatctttttgccattgccaaggacagccaaaagaagacccagagagtgtcactcctctttgaagacgatgttgatagcggaggctctctgtttggctctcctcccacatctgttcctcctgcaacaaagaaaaaagagactgtctctgaggcaccacctttgctgttcagcgatgaagaagagaaggaggcacaacttggagtgaagtctgtggataagaaggttgagagtgccaaggagtcattaaaatttgggagaactgatgtggctgagtcagaaaaggaaggacttttgactagatctgctcaggaaacagtcaagcattctgatttattttcttcatcatccccatgggacaaaggaaccaagcctagaaccaaaactgttcttagcttgtttgatgaggaagaggataaaatggaagatcaaaacattatccaggctccacagaaagaagtaggaaagggctgcgatcctgatgcccaccccaagagcacaggtgtcttccaggatgaagagctgcttttcagccacaagctccaaaaggacaatgacccagatgttgacctttttgctggcaccaaaaaaaccaagctgttagagccaagtgttgggagcctgtttggggatgatgaagatgatgatcttttcagctctgccaagtcccagcctttggtacaagagaaaaagagagtagtgaaaaaagaccactctgttaactctttcaaaaaccagaaacatcctgaatccattcaaggtagtaaagaaaaaggcatatggaagccggaaacacctcaggcaaatttagcgatcaacccagcggccttgctgcccacagcggcttcccagatctctgaagtaaagcctgttttgccagaattggcttttccttcatctgaacacagaaggagccacggtctggaaagtgtgcctgtccttcccgggagtggggaggccggtgtgagttttgatcttccagctcaggcagacaccttacacagtgcaaacaagagccgtgtcaagatgagagggaagcgtagaccgcagacccgtgcagctaggcggctggctgctcaggagtccagcgaggctgaggacatgagcatccccagaggacccattgcacagtgggctgatggcgccatttccccaaatggccatcggccacagctcagagcagccagtggagaagacagcactgaggaggccctggcagctgccgctgcaccttgggaaggtggtcctgtgcctggagtggacacaagcccctttgcaaagtctctgggtcattccagaggggaggctgacctttttgattctggggacattttttccacgggcactggatctcagtccgtggagagaacaaaacccaaggcaaagatagcagagaatcctgccaacccaccagtgggtggtaaagcaaagagccccatgtttcctgctctaggcgaggccagcagtgatgatgatctctttcagtctgctaaaccaaaaccagcaaagaaaacaaatccctttcctctcctggaagatgaggatgacctctttacagatcagaaagtcaagaagaatgagacaaaatccagtagtcagcaggatgtcatattaacaacacaagatatttttgaggatgatatatttgctacggaagcaattaaaccctctcagaaaaccagagagaaggagaaaacattggaatctaatttatttgatgataacattgatatctttgctgacttaactgtaaaaccaaaagaaaagtccaaaaagaaagtggaagccaagtctatatttgatgatgatatggatgacatcttctcctctggtatccaggctaagacaaccaaaccaaaaagccgatctgcacaggccgcacctgaaccaagatttgaacacaaggtgtccaacatctttgatgatcccctgaatgcctttggaggccagtagagcacacagggtatccacatgttaccctgcagctacattgttgagttagtgatgatgttgtatatgctgatggtcttaactggattacaaaaagcaaatactagaacagctagctcatcgttcacccaatgtacttggtatttttctgcactggtttaatcatgcttaatactacaaaacaaaaataaatatttcacagtggttggtttgttttgtttttaaaccacagtttgatttagttagccttgctggggccataatatgcttcagggtgtgtaaaagaagaaatctctttgtggctttcatgggcagggaatctcagagatagcaaatgccacctgaccagaagtctttgttatatggatgggaaccctaacttagggcttgggcaggggaaagagaaagaagatgagagattatacttcatgagtcttagcaatatgggagcaggttttcactgaattctgagggtgcctctgcatgtcctccaaggcaaagtttggcaaactgtggcccccccactgtcatattttgttaataaaattttattggaacacaaaaaaaaaaaaaaaa

SEQ ID NO: 12 - DNA, 4684 bp, Homo sapiens
  CDS (5)..(4111)
cgggatgctggggctaggcttccggggctctgcagtcctcggcgtgtgctggcagcttcggagcccaccgagccgggcggctaggatgatgaaccggacgacccccgaccaggagctggcgccagcgtcggagcccgtgtgggagcggccgtggtcgatggaggagatccgcaggagcagccagagctggtcgctggcggccgacgcgggcctactacagtttctacaggaattctcacagcaaactatctctaggacccatgaaatcaagaaacaagtggacggactaatccgggaaaccaaagccacagattgtcgcctgcataatgtcttcaatgacttccttatgctctctaatacccagttcatagagaatcgtgtatatgatgaagaagtggaggagccagtactcaaggctgaggcagaaaaaacagagcaggagaagacacgagagcagaaagaagtagatctcattcctaaagtccaggaggctgtgaactatggcttacaagtattggacagtgcctttgagcaacttgatatcaaagcaggaaactcagactccgaggaagatgatgctaatgggcgggtggaactgatccttgaaccaaaggatctatacattgatcgtcctttaccatatctcattgggtcaaagctgttcatggaacaagaagatgtaggtcttggagagctgtccagtgaagaaggctctgtaggcagtgatcgtggcagtattgtggacactgaggaagagaaagaagaggaggagtcagatgaagattttgcccatcacagtgacaatgaacaaaaccagcacaccacacaaatgagtgatgaggaagaggatgatgatggctgtgacctttttgctgactctgagaaggaggaggaagatattgaggacattgaagaaaatactagacctaaaagaagcagacctacatcgtttgcagatgagctggctgcccgcatcaagggggatgccatgggtcgagtggacgaggagccgacaaccttaccctcaggagaagcaaaacctcggaagacactcaaagagaagaaggaaaggagaactccttcagacgatgaagaggataacttattcgcaccccccaagctgaccgacgaggacttctcgccatttggctctggaggtggcctgttcagtggcggcaaggggctatttgatgatgaggacgaggagagtgacctcttcacggaagccccccaggatcggcaagctggagcctctgttaaggaggagtcttcatcatccaaacctggaaagaaaatcccagcaggagctgtttctgtatttttaggagacacggatgtgtttggtgctgcctccgttccatcaatgaaggagccacagaagcctgagcagcccactccaaggaaaagcccctatggtccccctcccactggcctctttgatgatgatgatggtgatgatgatgacgactttttctcggcaccccacagcaaaccttctaaaacaggcaaagtccaatccactgccgatatctttggtgacgaagaaggagatctgttcaaagaaaaagccgtagcatcgccagaagccactgtgagtcagacagatgaaaataaagcaagagcagaaaaaaaggttaccttatcttccagcaaaaatctcaagccctcatcagaaacaaagactcaaaaaggcttattttcagatgaggaggactctgaggatttgttttcttctcaaagtgcgagtaacttaaaaggtgcatctctgctgcctggcaagctccccacgtcggtttccctgtttgatgatgaagatgaagaggataatctttttgggggtacagctgctaagaagcagacattgtctctacaagctcagagagaagagaaagcaaaagcctccgagctctccaaaaagaaagcatctgccctgttgttcagcagtgatgaggaggaccagtggaatattcctgcttcacagacccacttagcatctgacagcaggtctaaaggagaacccagggattctgggaccctccagagccaggaggccaaggctgtgaaaaagaccagtctctttgaggaagacgaagaagatgatctttttgccattgccaaggacagccaaaagaagacccagagagtgtcactcctctttgaagacgatgttgatagcggaggctctctgtttggctctcctcccacatctgttcctcctgcaacaaagaaaaaagagactgtctctgaggcaccacctttgctgttcagcgatgaagaagagaaggaggcacaacttggagtgaagtctgtggataagaaggttgagagtgccaaggagtcattaaaatttgggagaactgatgtggctgagtcagaaaaggaaggacttttgactagatctgctcaggaaacagtcaagcattctgatttattttcttcatcatccccatgggacaaaggaaccaagcctagaaccaaaactgttcttagcttgtttgatgaggaagaggataaaatggaagatcaaaacattatccaggctccacagaaagaagtaggaaagggctgcgatcctgatgcccaccccaagagcacaggtgtcttccaggatgaagagctgcttttcagccacaagctccaaaaggacaatgacccagatgttgacctttttgctggcaccaaaaaaaccaagctgttagagccaagtgttgggagcctgtttggggatgatgaagatgatgatcttttcagctctgccaagtcccagcctttggtacaagagaaaaagagagtagtgaaaaaagaccactctgttaactctttcaaaaaccagaaacatcctgaatccattcaaggtagtaaagaaaaaggcatatggaagccggaaacacctcaggactcatcaggtctcgctccatttaaaaccaaagaaccatccactcggatcgggaagatacaagcaaatttagcgatcaacccagcggccttgctgcccacagcggcttcccagatctctgaagtaaagcctgttttgccagaattggcttttccttcatctgaacacagaaggagccacggtctggaaagtgtgcctgtccttcccgggagtggggaggccggtgtgagttttgatcttccagctcaggcagacaccttacacagtgcaaacaagagccgtgtcaagatgagagggaagcgtagaccgcagacccgtgcagctaggcggctggctgctcaggagtccagcgaggctgaggacatgagcatccccagaggacccattgcacagtgggctgatggcgccatttccccaaatggccatcggccacagctcagagcagccagtggagaagacagcactgaggaggccctggcagctgccgctgcaccttgggaaggtggtcctgtgcctggagtggacacaagcccctttgcaaagtctctgggtcattccagaggggaggctgacctttttgattctggggacattttttccacgggcactggatctcagtccgtggagagaacaaaacccaaggcaaagatagcagagaatcctgccaacccaccagtgggtggtaaagcaaagagccccatgtttcctgctctaggcgaggccagcagtgatgatgatctctttcagtctgctaaaccaaaaccagcaaagaaaacaaatccctttcctctcctggaagatgaggatgacctctttacagatcagaaagtcaagaagaatgagacaaaatccagtagtcagcaggatgtcatattaacaacacaagatatttttgaggatgatatatttgctacggaagcaattaaaccctctcagaaaaccagagagaaggagaaaacattggaatctaatttatttgatgataacattgatatctttgctgacttaactgtaaaaccaaaagaaaagtccaaaaagaaagtggaagccaagtctatatttgatgatgatatggatgacatcttctcctctggtatccaggctaagacaaccaaaccaaaaagccgatctgcacaggccgcacctgaaccaagatttgaacacaaggtgtccaacatctttgatgatcccctgaatgcctttggaggccagtagagcacacagggtatccacatgttaccctgcagctacattgttgagttagtgatgatgttgtatatgctgatggtcttaactggattacaaaaagcaaatactagaacagctagctcatcgttcacccaatgtacttggtatttttctgcactggtttaatcatgcttaatactacaaaacaaaaataaatatttcacagtggttggtttgttttgtttttaaaccacagtttgatttagttagccttgctggggccataatatgcttcagggtgtgtaaaagaagaaatctctttgtggctttcatgggcagggaatctcagagatagcaaatgccacctgaccagaagtctttgttatatggatgggaaccctaacttagggcttgggcaggggaaagagaaagaagatgagagattatacttcatgagtcttagcaatatgggagcaggttttcactgaattctgagggtgcctctgcatgtcctccaaggcaaagtttggcaaactgtggcccccccactgtcatattttgttaataaaattttattggaacacaaaaaaaaaaaaaaaa

SEQ ID NO: 13 - DNA, 1077 bp, Homo sapiens
  CDS (664)..(1053)
tctgagcatcctgcatggaagtcaaaggaaatccctttcttggtgacgacttaaatctgggttccctcagacattgggttgcaccccaacaaatattaaatggcttcttcttaaagcccagagaaagaggttttttaaaagactgtcgccaaatagctgagccaaaaggctgatcagaattcactttttggaatgtggcagttaaacactaccttgatcattctctcctctttcctcgaggaactcctggagggtttgagcgtctggaaactctctgctctgacccgaggaagcaccctcctgacgccgccttcctccggttattgaaaggacgcctcagaaatgctttgttttcttttacgatgtattcagaagcctttactgattaaagttttcttttatttgggtggccgggagagacccagggaggttctggaggttctggaggttcctttctgtctcctggccccaccagggatttccccatttctgtttgctgcctgaaagcaggatgaggaaggccaaggagagtccttgcacccgtgagcgtcaggatgaggaaatgacaggaggaagacgtgggtttgggttagtggctgctggcgttttggcccttggtgtttctggagcctccagggatctaggggagcctgggctgcgtgcatgtcgataagcagagctgttcttggggagaaggagggaggtctcgggagtgtagcaccatgccaaccagccctgcgcgaagacagagtgagccacgcccggatggcagggcatgtttctgttttggtgtctcactttcctcccagcgtgacttatttggggattcctcagggcctactggaatgtgactgcccactgcccagctgcctcgggtacaagtcctggccctatgtcccagctgtcaggggctcagggaatcctacccagccacctgtcctgggatggagtgtcagcatccaccccttggttgtcatcgaggccgccctcccagtcctgggtgaagatatttgggccaccagggctcccttggccccttcacgtaggaaatagacacgtgctttttaatgcaggaca

SEQ ID NO: 14 - DNA, 663 bp, Homo sapiens
  CDS (18)..(482)
cctaccttcagacagagatgcacccggagcctttgctcaattccacacaaagtgctccacaccatttcccagacagcttccaggccacccctttctgctttaaccagagcctgatcccaggatcaccttcaaattcctccattctctctggctccttagactacagttactcgccagtgcagctgccttcatatgctccagagaattacaattcccctgcttctctggacaccagaacctgtggctaccccccagaagaccattcctaccaacacttgtcttcacacgcccagtacagctgcttctcctcggccaccacctccatctgctgctgcgcatcgtgtgaggcagaggacttggatgctctccaggcggcagagtacttctacccgagcacagactgtgtggactttgccccctcagcagccgccaccagtgatttctataagagggaaacaaactgtgacatctgctatagttaatagaaattacagtaattcagaacatggcatgggtatatctatttttctaccacgtctagatgacactgcaaaatatgcaacttggtaacacaatatcccaagcacagtttacatgtcactatttccaattttctgatgctaagcattcatatgaagtcctcagacccggtcacagcgccac

SEQ ID NO: 15 - DNA, 970 bp, Homo sapiens
  CDS (2)..(751)
tatgcccggacagaggatcgcctcgctggcctactctctcctcccgtacggcgccggaatcccagctccacttaccaggccgcggctaccccgccgtcccccccgactcccgccaccccgctctctcaggctcttcaggatccaagtccgtaggccctttaaggggtctagttgccgtttgcgaggccctgggactttggtcccagacagcggggatccggatggcttccgtgcggatccgagaggccaaggagggagactgtggagatatcctgaggctgattcgggtgaagactgcaggccggagctagccgaattcgaaaaactctcggatcaggtgaagatcagtgaagaagccctgagagcagatggctttggagacaatcctttctatcactgtttggtagcagagattcttccagcgcccgggaagctactggggccctgcgtggtgggctatgggatatactatttcatctacagtacatggaagggacgcaccatttatctggaggatatctatgtgatgccggaatatcggggtcaagggattggttccaaaataatcaaaaaggtggctgaggtggccttggataagggctgctcccaattccgcctggccgtcctggactggaaccagagggccatggacttgtacaaggccctaggagcccaagatctgacggaagctgagggctggcacttcttctgctttcaaggagaggcaacgagaaagttggcaggaaagtgacgccatccctaggaggatctctgtcttgagtttctccttccccatcagctgaagcactcttcagagactacgtccacagacactgatgctgaggcctccctggaggaaggagggttaggggtgcctatcctcaagtattggaagagcagaattgagggagagacctttcttccttgttgagggtgaaaaataaataagaattacatgtcaaaaaaaaaa

SEQ ID NO: 16 - DNA, 640 bp, Homo sapiens
  CDS (38)..(541)
tccggcccttgcgatcagggcttgaggaacccgcgccatgaagtgcgtgtttgttaccgtagggaccaccagctttgacgacctcattgcgtgtgtgtcggcgcccgacagtctgcaaaaaatcgagagccttggttacaaccgacttatcctgcaaattggtagaggaacggtggtacctgaacccttcagtactgagtcgtttactctggatgtttacaggtacaaggattccttgaaagaagacattcagaaagcagatcttgttattagtcacgcaggtaaaggtgcaggaagctgtttggagactctggaaaaaggaaagccactcgtagtggttataaacgaaaagttgatgaacaatcatcagctggaactggcaaagcagctacacaaagagggtcatctcttctattgtacctgcagcacgcttcctgggctgttacagtcaatggacttatcaacactgaaatgttatcctcctggccagccagaaaaattttctgcatttttggataaagttgttggattacaaaaataaacactaaactctcaacactttaaaagcaacccccaaattcaacctatgtaatgtgattaaatcaaattaaatacataatatatatttaaaaaaaaaaaa

SEQ ID NO: 17 - DNA, 1862 bp, Homo sapiens
  CDS (375)..(1703)
ggaggagaccctcgacaagcggaggagcctgagcataccctcctcgatctacctttcccgagattctgccgcaaaaagaccgactggaaaatctcagaacccgactctacggctgccttctccaactatccccgagtctaccgctaggctgttgagcgggctctcccgctccgccggacgtgcaaagcacgcatgcacttctcccagattgttttgtcaatccggggacctgccttcttactctccactcccgcacagcccccgttcccaaagatctattccttcggtgcaagcgcatgtcattagcatctcattagctgtccgctcgggctccggaggcagccaacgccgccagtctgaggcaggtgcccgacatggcgagtgtagtgctgccgagcggatcccagtgtgcggcggcagcggcggcggcggcgcctcccgggctccggctccggcttctgctgttgctcttctccgccgcggcactgatccccacaggtgatgggcagaatctgtttacgaaagacgtgacagtgatcgagggagaggttgcgaccatcagttgccaagtcaataagagtgacgactctgtgattcagctactgaatcccaacaggcagaccatttatttcagggacttcaggcctttgaaggacagcaggtttcagttgctgaatttttctagcagtgaactcaaagtatcattgacaaacgtctcaatttctgatgaaggaagatacttttgccagctctataccgatcccccacaggaaagttacaccaccatcacagtcctggtcccaccacgtaatctgatgatcgatatccagaaagacactgcggtggaaggtgaggagattgaagtcaactgcactgctatggccagcaagccagccacgactatcaggtggttcaaagggaacacagagctaaaaggcaaatcggaggtggaagagtggtcagacatgtacactgtgaccagtcagctgatgctgaaggtgcacaaggaggacgatggggtcccagtgatctgccaggtggagcaccctgcggtcactggaaacctgcagacccagcggtatctagaagtacagtataagcctcaagtgcacattcagatgacttatcctctacaaggcttaacccgggaaggggacgcgcttgagttaacatgtgaagccatcgggaagccccagcctgtgatggtaacttgggtgagagtcgatgatgaaatgcctcaacacgccgtactgtctgggcccaacctgttcatcaataacctaaacaaaacagataatggtacataccgctgtgaagcttcaaacatagtggggaaagctcactcggattatatgctgtatgtatacgatccccccacaactatccctcctcccacaacaaccaccaccaccaccaccaccaccaccaccaccatccttaccatcatcacagattcccgagcaggtgaagaaggctcgatcagggcagtggatcatgccgtgatcggtggcgtcgtggcggtggtggtgttcgccatgctgtgcttgctcatcattctggggcgctattttgccagacataaaggtacatacttcactcatgaagccaaaggagccgatgacgcagcagacgcagacacagctataatcaatgcagaaggaggacagaacaactccgaagaaaagaaagagtacttcatctagatcagcctttttgtttcaatgaggtgtccaactggccctatttagatgataaagagacagtgatattggaacttgcgagaaattcgtgtgtttttttatgaatgggtggaaaggtgtgagactgggaaggcttgggatttgctgtgtaaaaaaaaaaaa

SEQ ID NO: 18 - DNA, 453 bp, Homo sapiens
  CDS (106)..(294)
tcctgattctggagcgtcttgtttccagccctctgtccgccttccacgtgcacccactgcctcttcccttctcgcttgggaactctagtctcgcctcgggttgcaatggaccccaactgctcctgtgccgctgcaggtgtctcctgcacctgcgccagctcctgcaagtgcaaagagtgcaaatgcacctcctgcaagaagagctgctgctcctgctgccctgtgggctgtgccaagtgtgcccagggctgcatctgcaaaggggcatcggagaagtgcagctgctgcgcctgatgtcgggacagccctgctcccaagtacaaatagagtgacccgtaaaatccaggattttttgttttttgctacaatcttgacccctttgctacattcctttttttctgtgaaatatgtgaataataattaaacacttagacttgattccaaaaaaaaaaa

SEQ ID NO: 19 - DNA, 2189 bp, Homo sapiens
  CDS (128)..(2050)
ggctgctcccggacaagggcaacgagcgtttcgtttggacttctcgacttgagtgcccgcctccttcgccgccgcctctgcagtcctcagcgcagtctttccacaggagccagcatacttcctgaacatggagagtgttgttcgccgctgcccattcttatcccgagtcccccaggcctttctgcagaaagcaggcaaatctctgttgttctatgcccaaaactgccccaagatgatggaagttggggccaagccagcccctcgggcattgtccactgcagcagtacactaccaacagatcaaagaaacccctccggccagtgagaaagacaaaactgctaaggccaaggtccaacagactcctgatggatcccagcagagtccagatggcacacagcttccgtctggacaccccttgcctgccacaagccagggcactgcaagcaaatgccctttcctggcagcacagatgaatcagagaggcagcagtgtcttctgcaaagccagtcttgagcttcaggaggatgtgcaggaaatgaatgccgtgaggaaagaggttgctgaaacctcagcaggccccagtgtggttagtgtgaaaaccgatggaggggatcccagtggactgctgaagaacttccaggacatcatgcaaaagcaaagaccagaaagagtgtctcatcttcttcaagataacttgccaaaatctgtttccacttttcagtatgatcgtttctttgagaaaaaaattgatgagaaaaagaatgaccacacctatcgagtttttaaaactgtgaaccggcgagcacacatcttccccatggcagatgactattcagactccctcatcaccaaaaagcaagtgtcagtctggtgcagtaatgactacctaggaatgagtcgccacccacgggtgtgtggggcagttatggacactttgaaacaacatggtgctggggcaggtggtactagaaatatttctggaactagtaaattccatgtggacttagagcgggagctggcagacctccatgggaaagatgccgcactcttgttttcctcgtgctttgtggccaatgactcaaccctcttcaccctggctaagatgatgccaggctgtgagatttactctgattctgggaaccatgcctccatgatccaagggattcgaaacagccgagtgccaaagtacatcttccgccacaatgatgtcagccacctcagagaactgctgcaaagatctgacccctcagtccccaagattgtggcatttgaaactgtccattcaatggatggggcggtgtgcccactggaagagctgtgtgatgtggcccatgagtttggagcaatcaccttcgtggatgaggtccacgcagtggggctttatggggctcgaggcggagggattggggatcgggatggagtcatgccaaaaatggacatcatttctggaacacttggcaaagcctttggttgtgttggagggtacatcgccagcacgagttctctgattgacaccgtacggtcctatgctgctggcttcatcttcaccacctctctgccacccatgctgctggctggagccctggagtctgtgcggatcctgaagagcgctgagggacgggtgcttcgccgccagcaccagcgcaacgtcaaactcatgagacagatgctaatggatgccggcctccctgttgtccactgccccagccacatcatccctgtgcgggttgcagatgctgctaaaaacacagaagtctgtgatgaactaatgagcagacataacatctacgtgcaagcaatcaattaccctacggtgccccggggagaagagctcctacggattgcccccacccctcaccacacaccccagatgatgaactacttccttgagaatctgctagtcacatggaagcaagtggggctggaactgaagcctcattcctcagctgagtgcaacttctgcaggaggccactgcattttgaagtgatgagtgaaagagagaagtcctatttctcaggcttgagcaagttggtatctgctcaggcctgagcatgacctcaattatttcacttaaccccaggccattatcatatccagatggtcttcagagttgtctttatatgtgaattaagttatattaaattttaatctatagtaaaaacatagtcctggaaataaaaaaaaaaaa

SEQ ID NO: 20 - DNA, 1920 bp, Homo sapiens
  CDS (59)..(745)
ggcggttgtctgtggccggaggctgatcagtgttctagaacagatcagacattttgtaatgatgcctgaaataaacactaaccacctcgacaagcaacaggttcaactcctggcagagatgtgtatccttattgatgaaaatgacaataaaattggagctgagaccaagaagaattgtcacctgaacgagaacattgagaaaggattattgcatcgagcttttagtgtcttcttattcaacaccgaaaataagcttctgctacagcaaagatcagatgctaagattacctttccaggttgttttacgaatacgtgttgtagtcatccattaagcaatccagccgagcttgaggaaagtgacgcccttggagtgaggcgagcagcacagagacggctgaaagctgagctaggaattcccttggaagaggttcctccagaagaaattaattatttaacacgaattcactacaaagctcagtctgatggtatctggggtgaacatgaaattgattacattttgttggtgaggaagaatgtaactttgaatccagatcccaatgagattaaaagctattgttatgtgtcaaaggaagaactaaaagaacttctgaaaaaagcagccagtggtgaaattaagataacgccatggtttaaaattattgcagcgacttttctctttaaatggtgggataacttaaatcatttgaatcagtttgttgaccatgagaaaatatacagaatgtgaatatgtaggtaaatgattacagaaaaatttatctgcttaacaaacttagaatgactttttccttttaaatttagttctatcattaatttatcattaaatttagttctatcatttggtactatcattaatgtattatatacactgatactttaaaacttgtgtggaaaaaactaacttataattttgtatcacacaccctggatatgtgttctgtttctaagcgacatttgtgagagattattgtaaaatgagagcgagcaaataaaacttaatttaatctttgcagatacatacttatgggaaatttgaacaaatgagtgaaactctgtgtttttagtaggctgtgataaacatttccggagcacttgcagaggacttgctatttgccaggtgctttatgtatcattaaatttttctcatagttcagaaaaatgtgcaaaggaaactattgtctcgctccttcaaaacagtcttaattaactttcatattagcagattaaactagcagagcaggttcaagggaaattaaatgatatggaccctaatttgtatcattctgagttgattgtgtggtttattcattctggaaacatgttgatacttacagtcagccactgcttttgataagtgatattgattaggttgaatcttcttgtaaatagtatttaccagttagcaaagtctgtgttttcagaattacagtgagcacagaggtgttcataaaatgggaattgagtcccactcggtaagagttgcttaaacttgacactgttgacatttgggctggataaaacccctgtggtggggtctgtgctgtgcattgcaggatggtgagcagcgtccctctcatgtgacacccacagttatgccggatgttgccagatgcccctaggggacagagtcaacccccaactgaggaccactgtcctacagagtcaggaaatattgtagggagaaaaaaataacaacaacaaaggcctgtgttaatgttaaatagatgagattatggaatgtgtatattaatgttaaaaattgtaccttgatcaatgtactttttataaacttgccatagatatctcagatttgaaacctcaagacagatttattattcttaaatgctgtatgataatgaagaaaaataaaaatttatttcttgcaaagttaaaaaaaaaaaa

SEQ ID NO: 21 - DNA, 1732 bp, Homo sapiens
  CDS (176)..(1648)
gaaagagccggtgaaggggcagaacaggcaggttccctcgacccaggaccccctgttcccaggctatggcccccagtgccctgtagacctggcaggccccccgtgcttgcgacccctatttgggggtctgggtggctactggagggccttgcagaggggcagagaaggcaggaccatgacatctagggcctctgaactttctccggggcgcagcgtgacggctggcatcatcattgttggagatgagatccttaagggacacactcaggacaccaacaccttctttctgtgccggacactgcgctccctaggggtccaggtttgccgagtctcagttgtacctgatgaggtagccaccattgcagctgaggtcacttctttctccaaccgcttcacccatgtcctcacagcagggggcatcggccccactcatgatgatgtgacctttgaggcagtggcacaggcctttggagatgagctgaagccacaccccaagttggaagcagccaccaaagccctaggaggggaaggctgggagaagctatcattggtgccctcctctgcccgcctgcattatggcacagatccttgcactggtcaacctttcagattccctctggtctccgtccgaaacgtctacctcttcccaggcattccagagctgctgcggcgggtgctggaggggatgaagggactattccaaaacccagctgttcagttccactcaaaggagctatatgtggctgctgatgaagcctccatcgcccccattctggctgaggcccaggcccactttggacgtaggcttggcctgggttcctaccctgactggggcagcaactactatcaggtgaagctgactctagactcagaggaagaaggacccctggaggaatgcttggcctacctgactgcccgtttgccccagggatcgctggtcccctacatgcccaacgctgtggagcaggccagtgaggctgtatacaaactcgctgaatcagggtcttctttggggaaaaaggtggcaggtgccctacagaccattgagacctccctggctcagtacagcctcacccagctctgtgtgggcttcaacgggggcaaagactgcactgccctcctgcacctcttccatgcagctgtgcagaggaaattacctgatgttccaaaccccctccagatcctgtatatccgcagcatctcccctttccctgagctggaacagtttctacaggacactatcaagaggtataatctgcagatgttggaagctgagggcagcatgaagcaggccctgggtgaactgcaggcacggcacccccagctggaggctgtccttatgggcacccgccggactgacccctactcctgtagcctctgccctttcagccccactgacccaggctggcccgcattcatgcgcatcaacccactgctggactggacctacagagacatctgggattttctgcgtcagctgtttgtcccatactgtatcctgtatgaccgaggatacacatcactggggagtcgggagaataccgtgcggaacccggccctgaagtgcctgagcccaggaggacaccccacataccgtccagcctatctactggagaacgaagaagaggagcggaactcccgcacatgacctcccaccctaggagggagggaaggacaccgtcctagggtataacctggcaataaaccgtgcctctcactgtgaaaaaaaaaa

SEQ ID NO: 22 - DNA, 1101 bp, Homo sapiens
  CDS (91)..(504)
aaggatccttaattaaattaatccccccccccccgggtgcgacagcagctggagggcagaggaggcggcgcggggtgtcctgtcctcgccatgaggccgcagcaggcgccggtgtccggaaaggtgttcattcagcgagactacagcagtggcacacgctgccagttccagaccaagttccctgcggagctggagaaccggattgataggcagcagtttgaagaaacagttcgaactctaaataacctttatgcagaagcagagaagctcggcggccagtcatatctcgaaggttgtttggcttgtttaacagcatataccatcttcctatgcatggaaactcattatgagaaggttctgaagaaagtctccaaatacattcaagagcagaatgagaagatctatgctccacaaggcctcctcctgacagaccctattgagcgaggactgcgagttattgaaattaccatttatgaagacagaggcatgagcagtggaagataaaccgaagaattaaagatcccacttccagccgggcccctcatgtatccactggccgaccgcagagtgtccctacctcctctccagagcatcattcctttctatctgctgccagagccacggtgccatttactccaaggactcactttctaaaattccacacctggagtgacctctagtcgctcagcatccactttgtgtctccaaattgtgtaggactctgtaatcttttgattagtttctgagaaaacacaatgaagcacttcacttttttttattcaaagccatttaataaaacacagttggtcagcccagtgcaaagcttgttatctgccaccagtacataccattggttctcttcattccttgggccagcttctcaggtggctttagacctcaacaagccgtatcttcaccagtgttctatcttgttcccctaaattaataaaatgtttttctccaggattttggtgagggttggctgtggctgtcgttttgcacctcccagatttcaaagaattaccggttttaccatgactcaaatcttaagatctgtttctactattcagttcctcaaactgaagcttattgaaaaaaaaa

SEQ ID NO: 23 - DNA, 852 bp, Homo sapiens
  CDS (377)..(592)
  misc_feature (1)...(852): n = a,t,c or g
agtgcggaggaattccgagaatctgcatctttttgtaacagggagcctgtcacggaggggcattattgcctgtctgttggcacatgactggggaaaaggaggattcagagaatctggatgaattcattttatgaacttctggtgacaggccagcaaaaggatgaagagaaaaatcttcaagctttcagaagccaaaggaacaaattattaaggaaaagagtcacactggcaccagatttcctatttacaacaccaagaagctagaagatggtggaatttcatctacagaccacggggataaaaggaatgcagctcaagcatcctgtacccaggtttcaagtgccccatttgctccaagtctgtggcttctgacgagatggaaatgcactttataatgtgtttgagcaaacctcgcctctcctacaacgatgatgtgctgactaaagacgcgggtgagtgtgtgatctgcctggaggagctgctgcagggggacacgatagccaggctgccctgcctgtgcatctatcacaaaagctgcatagactcgtggtttgaagtgaacagatcttgtccggaacaccctgcggactgacctgcgggcttgcttgctgactcctctcaaaggcccgcctgatgtgctggaccatccccctgctgccacggcccctggctccgcagtcaccctccatcagatgcttccagaagcacctactctgtgcaagggcattcacaacaggccagtgggcaaacgtgagccagggccagcggagaaacactaaagaagactcggtggttcagagcctgggtctcagcgcgggacccgtctgtngtgaagaccttggggctgttgtg

SEQ ID NO: 24 - DNA, 2150 bp, Homo sapiens
  CDS (173)..(1321)
cgcttgggtagaggaagccgtgaggccggagcttaggtcgggaagggatggatcgctgagccgatagcgtccgctaggctgtctgcctcggtacctgttactgctgctacttcctcgtttgacaccttcctggaatctctcttgatttttgaggaaatacctagtaacaaacatgactgagttctggcttatatctgctcctggggagaaaacctgtcagcaaacatgggagaaattgcatgcggcaacttcaaagaacaataatcttgctgtcacttccaagttcaatattcctgacttaaaggttggcacgttggatgtcttggttggcttgtcagatgaactggctaaactggatgcatttgtagaaggagtggttaagaaagtagctcaatacatggctgatgtattggaagatagcaaagacaaagttcaagagaatctgttggctaatggagtggacttggttacttatataacaaggttccagtgggacatggccaaatatccaatcaagcagtccctgaaaaatatttctgaaataattgccaagggagtaactcagattgataatgacctgaaatctcgagcatctgcatacaataacctgaaaggaaatcttcagaatttggaacgaaagaatgcaggaagtttgctaactagaagtctagcagaaattgtgaagaaggatgactttgttcttgattcagagtatctcgtcacattactggtagtagttcccaagttaaaccacaacgactggattaagcagtatgaaacactagccgaaatggtagttccaaggtctagcaatgttctttcagaggaccaagacagttacctgtgtaatgtcaccttgtttaggaaggcagttgatgacttcagacacaaagccagagaaaacaaattcattgttcgtgacttccagtataatgaagaggagatgaaagcagataaagaagaaatgaacaggctttctactgataagaaaaaacaatttggaccacttgtacggtggctgaaagtgaattttagtgaagcatttattgcatggattcacgtgaaagcattacgggttttcgttgagtctgttttaaggtatggcttgccagtgaacttccaagcaatgctacttcagcccaataagaaaactttgaagaaactgagagaagtattacatgaattgtataaacatctagacagcagtgcagcagctattattgatgctcctatggatattccaggtttaaacctgagtcaacaagaatactacccctatgtgtactacaagattgattgcaacttgctggaattcaagtgaaaatgggctcctcccccgacaatcctgtccttgtgtttgtgtgtgctaacagaaataagttgcagtatggtcgtacttttaactctagtatcctttgcttgcttcttaccccctttcctaggtgaattctcccacagtggtctgtatctcaacattttctttttaaaggaaaaaatatatatatatagtttctttttattgatcaggtctgtaaatgtgtactaaaaaaatcagagtttatttataaacagaatagtttatttaaagagaaggtctcttccttattgatatcatggtatgcattaattccatttgttactattgtgcacaaaagccctgttcacaggggaatggtgtaaacatttatactgttttgttcactgtatttagtagacataactgttgaatagttactgaatcatgatgtaaagaatatgtgaccatcttcaggtatgggatttctgaacgtttcaaatttcaatcaatgagcactgtcaacacccacaggagagaataaaattacctgtgcaaaggtgtattgtggtgtgtgtaacttaagattacagttctgtttgagagttaaatgatgtcatagctcacttgctatgctgcttccaggattttgttatatgctgaggtgtaaccatttgtgttgtctgactttcgtatgatttaattgagccaaatttgggtcagaacacaaatttgaagatgacttttcagtatatgatgggtatttacatttgaacactagaattttaggtctctcaaataattaagaatagagccagttttgaataaagtctagcagaactatgaaaaaaaaaaa

SEQ ID NO: 25 - DNA, 1588 bp, Homo sapiens
  CDS (104)..(694)
ggcttagttgccggagctgaacggcgcggagctggtctgaggcgagccgagccgagcgagcgcggcggtggggccgagaggacgcgcaggtggcggcgttgccatgtcgcacggtcacagccacggcgggggtggctgccgctgcgccgccgaacgggaggagccgcccgagcagcgcggcctggcctacggcctgtacctgcgcatcgacctggagcggctgcaatgccttaacgagagccgcgagggcagcggccgcggcgtcttcaagccgtgggaggagcggaccgaccgctcaagatttacgggcaatgtcaagctcaaaggcatcattataatgggagaggatgatgactcacacccctctgagatgagactgtacaagaatattccacagatgtcctttgatgatacagaaagggagccagatcagacctttagtctgaaccgggatcttacaggagaattagagtatgctacaaaaatttctcgtttttcaaatgtctatcatctctcaattcatatttcaaaaaacttcggagcagatacgacaaaggtcttttatattggcctgagaggagagtggactgagcttcgccgacacgaggtgaccatctgcaattacgaagcatctgccaacccagcagaccatagggtccatcaggttaccccacagacacactttatttcctaagggctggccaaggctcccatagaggcgctgtgtcagtgaagatgtacgactacctgttgggaaggacaaagggatgaggctccagagagagttggctgccacagcctctgccaagctttgtctttggggcttgctgcagaaacctggcctacggaagatacgacaccactgggagggttgtgtaggtgccaggggaccatcgtggttctctagggcgctgtggaaattgggtcttgggctgggtggcatctggcagtcatgggtaacacttgcttttccagttaatgtggccatgtgattccaagtgtcatgttgctttgtggcaagattgttgtgtgacttgtttttttgtttttgtttttgtttttttaaaggaaactatttgtgggctataggaaactttctgatgcctccggattgtgttagtagtagccatcaggagggtctccaactaaaacacttgttcctgcttgctcctttcccctctcattgttcagcattcttgtcaagttgcccagcttggagttgtctgtcacgcacatgtgtcctgtggttatagctagaaggacaggagtctcctgctgatgcgtgatagcttaagcttggggagaaggtcttttccactgcctagctaagcagtctggggagagcatggggatcatttctatgtgtgtgggtaatctggtcagtaagattgagacttagttaagattccccttggaaattccttaatgtttattagcttctaactagtgttgtaagtccgatgccagaatttggagatttgagttcttcttttcatggcttttattcactgtgactaataagcttcctaataaatccttgccagacttaaaaaaaaaaaaaaaaaaaaaattggcggccgcaagctta

SEQ ID NO: 26 - DNA, 1846 bp, Homo sapiens
  CDS (630)..(1649)
aaggatgaggaaaggatatcccagagtgccagggcgcgcaaaccaaacttcacactctaggaagacagaggccagaggaaccaggagggcttcctggaggaggtggcatttactctgggcctaagagatcacaggaaaatggaggccagcattctaggcctggggaagagtttgggcaaaggcttggcagtaagagaataaaggtggggcttgatgggccagaggataagtgactcctcaaggtcacaagacaccctgatggctgggaccccatctctgatggagcaaggcttctgatacccaactgaggcttggcgccaaggactgacatcaaggaagtggattcctgcaaacctggcacccgagggtccacttcctcaatttctgtgcagctgggaggtgaggtaagaggaagtgtgggccacaggctaggcccagagagcctggaggaggagcctctgccagactggagagaagcaggcctgagcctccccaaaggcagctcctggggactcccaggaccacaggctgagacgagacgcagggtggctggaggaagtgagaggtgaactcagcctgggactggctgggcgagactctccacctgctccctgggaccatcgcccaccatggctgtggcccagcagctgcgggccgagagtgactttgaacagcttccggatgatgttgccatctcggccaacattgctgacatcgaggagaagagaggcttcaccagccactttgttttcgtcatcgaggtgaagacaaaaggaggatccaagtacctcatctaccgccgctaccgccagttccatgctttgcagagcaagctggaggagcgcttcgggccagacagcaagagcagtgccctggcctgtaccctgcccacactcccagccaaagtctacgtgggtgtgaaacaggagatcgccgagatgcggatacctgccctcaacgcctacatgaagagcctgctcagcctgccggtctgggtgctgatggatgaggacgtccggatcttcttttaccagtcgccctatgactcagagcaggtgccccaggcactccgccggctccgcccgcgcacccggaaagtcaagagcgtgtccccacagggcaacagcgttgaccgcatggcagctccgagagcagaggctctatttgacttcactggaaacagcaaactggagctgaatttcaaagctggagatgtgatcttcctcctcagtcggatcaacaaagactggctggagggcactgtccggggagccacgggcatcttccctctctccttcgtgaagatcctcaaagacttccctgaggaggacgaccccaccaactggctgcgttgctactactacgaagacaccatcagcaccatcaaggacatcgcggtggaggaagatctcagcagcactcccctattgaaagacctgctggagctcacaaggcgggagttccagagagaggacatagctctgaattaccgggacgctgagggggatctggttcggctgctgtcggatgaggacgtagcgctcatggtgcggcaggctcgtggcctcccctcccagaagcgcctcttcccctggaagctgcacatcacgcagaaggacaactacagggtctacaacacgatgccatgagctgacggtgtccctggagcagtgaggggacaccagcaaaaaccttcagctctcagaggagattgggaccaggaaaacctgggaggatgggcagacttcctgtctttgaggctaatggacccgtggggcttgtaatctgtctctttctactatttacatctgatttaaataaaccattccatctgaaaaaaaaaaaa

SEQ ID NO: 27 - DNA, 1807 bp, Homo sapiens
  CDS (630)..(1610)
aaggatgaggaaaggatatcccagagtgccagggcgcgcaaaccaaacttcacactctaggaagacagaggccagaggaaccaggagggcttcctggaggaggtggcatttactctgggcctaagagatcacaggaaaatggaggccagcattctaggcctggggaagagtttgggcaaaggcttggcagtaagagaataaaggtggggcttgatgggccagaggataagtgactcctcaaggtcacaagacaccctgatggctgggaccccatctctgatggagcaaggcttctgatacccaactgaggcttggcgccaaggactgacatcaaggaagtggattcctgcaaacctggcacccgagggtccacttcctcaatttctgtgcagctgggaggtgaggtaagaggaagtgtgggccacaggctaggcccagagagcctggaggaggagcctctgccagactggagagaagcaggcctgagcctccccaaaggcagctcctggggactcccaggaccacaggctgagacgagacgcagggtggctggaggaagtgagaggtgaactcagcctgggactggctgggcgagactctccacctgctccctgggaccatcgcccaccatggctgtggcccagcagctgcgggccgagagtgactttgaacagcttccggatgatgttgccatctcggccaacattgctgacatcgaggagaagagaggcttcaccagccactttgttttcgtcatcgaggtgaagacaaaaggaggatccaagtacctcatctaccgccgctaccgccagttccatgctttgcagagcaagctggaggagcgcttcgggccagacagcaagagcagtgccctggcctgtaccctgcccacactcccagccaaagtctacgtgggtgtgaaacaggagatcgccgagatgcggatacctgccctcaacgcctacatgaagagcctgctcagcctgccggtctgggtgctgatggatgaggacgtccggatcttcttttaccagtcgccctatgactcagagcaggtgccccaggcactccgccggctccgcccgcgcacccggaaagtcaagagcgtgtccccacagggcaacagcgttgaccgcatggcagctccgagagcagaggctctatttgacttcactggaaacagcaaactggagctgaatttcaaagctggagatgtgatcttcctcctcagtcggatcaacaaagactggctggagggcactgtccggggagccacgggcatcttccctctctccttcgtgaagatcctcaaagacttccctgaggaggacgaccccaccaactggctgcgttgctactactacgaagacaccatcagcactcccctattgaaagacctgctggagctcacaaggcgggagttccagagagaggacatagctctgaattaccgggacgctgagggggatctggttcggctgctgtcggatgaggacgtagcgctcatggtgcggcaggctcgtggcctcccctcccagaagcgcctcttcccctggaagctgcacatcacgcagaaggacaactacagggtctacaacacgatgccatgagctgacggtgtccctggagcagtgaggggacaccagcaaaaaccttcagctctcagaggagattgggaccaggaaaacctgggaggatgggcagacttcctgtctttgaggctaatggacccgtggggcttgtaatctgtctctttctactatttacatctgatttaaataaaccattccatctgaaaaaaaaaaaa

SEQ ID NO: 28 - DNA, 680 bp, Homo sapiens
  CDS (221)..(478)
ctgggttaggtgccgctgttgctgctcgtgttgaatctagaaccgtagccagacatgggactggaggacgagcaaaagatgcttaccgaatccggagatcctgaggaggaggaagagggagaggaggaattagtgataggactgaggctttcagtgcatactggcaaccttggaaggcaggaatgtgaaacttttccctactacttagcatcagaattgaatgggagaccgcattctgccatttctggcggcagtgtggctctgccagctggccttctgcacggatcccctaacaacagtgagagagcaatgcgagcagttggagaaatgtgtaaaggcccgggagcggctagagctctgtgatgagcgtgtatcctctcgatcacatacagaagaggattgcacggaggagctctttgacttcttgcatgcgagggaccattgcgtggcccacaaactctttaacaacttgaaataaatgtgtggacttaattcaccccagtcttcatcatctgggcatcagaatatttccttatggttttggatgtaccatttgtttcttatttgtgtaactgtaagttcacatgaacctcatgggtttggcttaggctggtagcttctatgtaattcgcaatgattccatctaaataaaagttctatgatctgcaaaaaaaaaaaaa

SEQ ID NO: 29 - DNA, 1792 bp, Homo sapiens
  CDS (438)..(713)
tgcttgattttttcatgttcttctacctgctgatgcaacattccaacctccttatgtgtcacatccaactgactcgtaagactcttaagttcctgttcacggattttcaagcaagtttctagagcatgtgtacgtccttcccattcagattttttatgagccaccattatgtcaatctgtttcatgagctcctgtagttctgcttcacaagatgtcaaaaatcccccaccatgccctcgattttgtattccttctaacaaagcctccatcaccaaatcccctttgttttggcaaccacatccgggaatccgaggaaagcgagtgcagacacgtgatgcgggggagggcggggcgtggcaggagcaagcgtctgccgcggtggccgggtgccggtaagggtttccagcgcccccggcctaggttttggaggcgcgggaatgcgttcgttgctcagtgtcggacttccccctattcccatcggccgaggctgtcactttacgctcataaccgtttttctttactgcactcgtgtcgggaggaaagggacttgcgtggcacccccagacctccccgtctccgcttccacgtttggtacatcctgcctgaggcaggaagccgcagctgagggacggcctgtcgtacgatttgacaagatcaaagctgcaggaaaatggacagtgaggttcagagagatggaaggatcttggatttgattgatgatgcttggcgagaagacaagctgccttatgaggatgtcgcaataccactgaatgagcttcctgaacctgaacaagacaatggtggcaccacagaatctgtcaaagaacaagaaatgaagtggacagacttagccttacagtacctccatgagaatgttccccccattggaaactgacgcttggctcctttcttgtggatggattttctcaaagtacacagataaagcatggtttgtttcagtctccaaattcaaacctttgagtaataaatcagcactcaaaaatgtacacccatttagtttgtggtagcaaagtgcaatgcgaaattgaatgagaaactgagatttctcagtaatggtgaatatttcgctctttaaacctaaaactcttcattgagtagcttatatttgaacatgattggttaaacatttgcctctacctctgattttgctttgctgtcaaagtttaacaccttccaactacttatgtgtgtcctgtaacacaggtgattgaacgtatgagagggaaaggcaaagaaaaaggaagccagacactaggagaattattaacttctcatacttccccacattgagaagcattcggagtgtatttagcctgtagatgttgtgatatgcaaatatcccattccctggttactggcattcctaagattcttcatggtattttcaaactttggataaatttacagattagaaagatatctgacagttaatctctgttctccttacaaattccttttgtgctgctggaaaggatctttggctaggtggatgactagttttattcaaagccttttctcaaagccctttcagttacaaccaccccactatggaatcagtatttagttatacatttgtataagaacctgtattttgaaaaacacattcatgtatatttattcctggaattatttgcctgttaaacagtgtctttcatgttctctccccagattgtaaactctgtaagaagctgcttgtatctgtatcccttgttgaaactctgaaaacactgaataactaaaatctcttctcatccttttaaaaaaaaaaaaa

SEQ ID NO: 30 - DNA, 1292 bp, Homo sapiens
  CDS (205)..(1077)
cctcccgcctcctctaggccgccggccgcgaagcgctgagtcacggtgaggcgactggacccacactctcttaacctgccctccctgcactcgctcccggcggctcttcgcgtcacccccgccgctaaggctccaggtgccgctaccgcagcccctccatcctctacagctcagcatcagaacactctctttttagactccgatatggggtcctccaagaaagttactctctcagtgctcagccgggagcagtcggaaggggttggagcgagggtccggagaagcattggcagacccgagttaaaaaatctggatccgtttttactgtttgatgaatttaaaggaggtagaccaggaggatttcctgatcatccacatcgaggttttgaaacagtatcctacctcctggaagggggcagcatggcccatgaagacttctgtggacacactggtaaaatgaacccaggagatttgcagtggatgactgcgggccggggcattctgcacgctgagatgccttgctcagaggagccagcccatggcctacaactgtgggttaatttgaggagctcagagaagatggtggagcctcagtaccaggaactgaaaagtgaagaaatccctaaacccagtaaggatggtgtgacagttgctgtcatttctggagaagccctgggaataaagtccaaggtttacactcgcacaccaaccttatatttggacttcaaattggacccaggagccaaacattcccaacctatccctaaagggtggacaagcttcatttacacgatatctggagatgtgtatattgggcccgatgatgcacaacaaaaaatagaacctcatcacacagcagtgcttggagaaggtgacagtgtccaagtggagaacaaggatcccaagagaagccactttgtcttaattgctggggagccattaagagaaccagttatccaacatggtccatttgtgatgaacaccaatgaagagatttctcaagctattcttgatttcagaaacgcaaaaaatgggtttgaaagggccaaaacctggaaatcaaagattgggaactagtggaaagcggaagagcaggtcttgatgtgtcctagaattttgccatttctgagattgagccattgaaggcattccatttctaaagcttatttagccggtgcttctaaagaattccacactaacgtgataacatggtttttgtaacaataaatgtaggatatttcctggcacatgcaaataaacctaatcattgtttctttaaaaaaaaaaaaaaa

SEQ ID NO: 31 - DNA, 4146 bp, Homo sapiens
  CDS (1)..(1914)
atggccaaagaaggaaggtatgagtgtatctgtgggtgggcatttgtaaaggatgttcatgaagattcaataacagttgcatttgaaaacaactggcagcctgataggcagattccatttcatgatgtcagattcccacctcctgtaggttataataaagatataaatgaaagtgatgaagttgagttttatgtgatagaatatgcagcatgtgatgcaacttacaatgaaattgtcacaattgaacgtctaagatctgttaatcccaacaaacctgccacaaaagatactttccataagatcaagctggatgtgccagaagacttacggcaaatgtgtgccaaagaggcggcacataaggattttaaaaaggcagttggtgccttttctgtaacttatgatccagaaaattatcagcttgtcattttgtccatcaatgaagtcacctcaaagcgagcacatatgctgattgacatgcactttcggagtctgcgcactaagttgtctctgataatgagaaatgaagaagctagtaagcagctggagagttcaaggcagcttgcctcgagatttcatgaacagtttatcgtaagagaagatctgatgggtctagctattggtactcatggtgctaatattcagcaagctagaaaagtacctggggtcactgctattgatctagatgaagatacctgcacatttcatatttatggagaggatcaggatgcagtgaaaaaagctagaagctttctcgaatttgctgaagatgtaatacaagttccaaggaacttagtaggcaaagtaataggaaaaaatggaaagctgattcaggagattgtggacaagtcaggagttgtgagggtgaggattgaggctgaaaatgagaaaaatgttccacaagaagaggaaattatgccaccaaattcccttccttccaataattcaagggttggacctaatgccccagaagaaaaaaaacatttagatataaaggaaaacagcacccatttttctcaacctaacagtacaaaagtccagagggtgttagtggcttcatcagttgtagcaggggaatcccagaaacctgaactcaaggcttggcagggtatggtaccatttgtttttgtgggaacaaaggacagcatcgctaatgccactgttcttttggattatcacctgaactatttaaaggaagtagaccagttgcgtttggagagattacaaattgatgagcagttgcgacagattggagctagttctagaccaccaccaaatcgtacagataaggaaaaaagctatgtgactgatgatggtcaaggaatgggtcgaggtagtagaccttacagaaatagggggcacggcagacgcggtcctggatatacttcaggaactaattctgaagcatcaaatgcttctgaaacagaatctgaccacagagacgaactcagtgattggtcattagctccaacagaggaagagagggagagcttcctgcgcagaggagacggacggcggcgtggagggggaggaagaggacaaggaggaagaggacgtggaggaggcttcaaagattctgtggttggtttaaatagagggtgtgggaataaagaacttccagtaagcatttcagaatcagtaactgttgaaccttttgaaaatattctcataggaaacgacgatcactcccgaacagataatcgtccacgtaatccaagagaggctaaaggaagaacaacagatggatcccttcagatcagagttgactgcaataatgaaaggagtgtccacactaaaacattacagaatacctccagtgaaggtagtcggctgcgcacgggtaaagatcgtaaccagaagaaagagaagccagacagcgtggatggtcagcaaccactcgtgaatggagtaccctaaactgcataattctgaagttatatttcctataccatttccgtaattcttattccatattagaaaactttgttaggccaaagacaaatagtaggcaagatggcacagggcatgaaatgaacacaaattatgctaagaattttttattttttggtattggccataagcaacaattttcagatttgcacaaaaagataccttaaaatttgaaacattgcttttaaaactacttagcacttcagggcagattttagttttattttctaaagtactgagcagtgatattctttgttaatttggaccattttcctgcattgggtgatcattcaccagtacattctcagtttttcttaatatatagcatttatggtaatcatattagacttctgttttcaatctcgtatagaagtcttcatgaaatgctatgtcatttcatgtcctgtgtcagtttatgttttggtccacttttccagtattttagtggaccctgaaatgtgtgtgatgtgacatttgtcattttcattagcaaaaaaagttgtatgatctgtgccttttttatatcttggcaggtaggaatattatatttggatgcagagttcagggaagataagttggaaacactaaatgttaaagatgtagcaaaccctgtcaaacattagtactttatagaagaatgcatgctttccatatttttttccttacataaacatcaggttaggcagtataaagaataggacttgtttttgtttttgttttgttgcactgaagtttgataaatagtgttattgagagagatgtgtaatttttctgtatagacaggagaagaaagaactatcttcatctgagagaggctaaaatgttttcagccaggaacaaatcttcctggtcgaaagttagtaggatatgcctgctctttggcctgatgaccaattttaacttagagctttttttttttaattttgtctgccccaagttttgtgaaatttttcatattttaatttcaagcttattttggagagataggaaggtcatttccatgtatgcataataatcctgcaaagtacaggtactttgtctaagaaacattggaagcaggttaaatgttttgtaaactttgaaatatatggtctaatgtttaagcagaattggaaaagactaagatcggttaacaaataacaacttttttttctttttttcttttgttttttgaagtgttggggtttggttttgttttttgagtcttttttttttaagtgaaatttattgaggaaaaatatgtgaaggaccttcactctaagatgttatatttttcttaaaaagtaactcctagtaggggtaccactgaatctgtacagagccgtaaaaactgaagttctgcctctgatgtattttgtgagtttgtttctttgaattttcattttacagttacttttccttgcatacaaacaagcatataaaatggcaacaaactgcacatgatttcacaaatattaaaaagtcttttaaaaagtattgccaaacattaatgttgatttctagttatttattctgggaatgtatagtatttgaaaacagaaattggtaccttgcacacatcatctgtaagctgtttggttttaaaatactgtagataattaaccaaggtagaatgaccttgtaatgtaactgctcttgggcaatattctctgtacatattagcgacaacagattggattttatgttgacatttgtttggttatagtgcaatatattttgtatgcaagcagtttcaataaagtttgatcttcctctgctaaattgatgttgatgcaatccttacaaatgattgcttttaaaattttaagctaggaaaagaaatctatagaaagtgttctgttacaaaatgtaactgttaccattggaaatttcacgtcataggaagttagcctttatctaccaactttcaagaacttgtttaataaagcgaaaaactcaaccaaatggtacaaaaccacagtgtaccattaaaatatgcactaagtctcttttttacaaaggctgtattcagcaaggcgctaacttgcttaaatgtgaattactaacttctaaaactgtactttgattcacatgttttcaaatggagttggagttcattcatattacaatatttgtgtgctaaacgtgtatgtttttcagttcaaagtcatgatgtttttaaaatcttattaaagtttcaaaaatctgaaaaaaaaaaaa

SEQ ID NO: 32 - DNA, 4083 bp, Homo sapiens
  CDS (1)..(1851)
atggccaaagaaggaaggtatgagtgtatctgtgggtgggcatttgtaaaggatgttcatgaagattcaataacagttgcatttgaaaacaactggcagcctgataggcagattccatttcatgatgtcagattcccacctcctgtaggttataataaagatataaatgaaagtgatgaagttgagttttatgtgatagaatatgcagcatgtgatgcaacttacaatgaaattgtcacaattgaacgtctaagatctgttaatcccaacaaacctgccacaaaagatactttccataagatcaagctggatgtgccagaagacttacggcaaatgtgtgccaaagaggcggcacataaggattttaaaaaggcagttggtgccttttctgtaacttatgatccagaaaattatcagcttgtcattttgtccatcaatgaagtcacctcaaagcgagcacatatgctgattgacatgcactttcggagtctgcgcactaagttgtctctgataatgagaaatgaagaagctagtaagcagctggagagttcaaggcagcttgcctcgagatttcatgaacagtttatcgtaagagaagatctgatgggtctagctattggtactcatggtgctaatattcagcaagctagaaaagtacctggggtcactgctattgatctagatgaagatacctgcacatttcatatttatggagaggatcaggatgcagtgaaaaaagctagaagctttctcgaatttgctgaagatgtaatacaagttccaaggaacttagtaggcaaagtaataggaaaaaatggaaagctgattcaggagattgtggacaagtcaggagttgtgagggtgaggattgaggctgaaaatgagaaaaatgttccacaagaagaggaaattatgccaccaaattcccttccttccaataattcaagggttggacctaatgccccagaagaaaaaaaacatttagatataaaggaaaacagcacccatttttctcaacctaacagtacaaaagtccagaggggtatggtaccatttgtttttgtgggaacaaaggacagcatcgctaatgccactgttcttttggattatcacctgaactatttaaaggaagtagaccagttgcgtttggagagattacaaattgatgagcagttgcgacagattggagctagttctagaccaccaccaaatcgtacagataaggaaaaaagctatgtgactgatgatggtcaaggaatgggtcgaggtagtagaccttacagaaatagggggcacggcagacgcggtcctggatatacttcaggaactaattctgaagcatcaaatgcttctgaaacagaatctgaccacagagacgaactcagtgattggtcattagctccaacagaggaagagagggagagcttcctgcgcagaggagacggacggcggcgtggagggggaggaagaggacaaggaggaagaggacgtggaggaggcttcaaagattctgtggttggtttaaatagagggtgtgggaataaagaacttccagtaagcatttcagaatcagtaactgttgaaccttttgaaaatattctcataggaaacgacgatcactcccgaacagataatcgtccacgtaatccaagagaggctaaaggaagaacaacagatggatcccttcagatcagagttgactgcaataatgaaaggagtgtccacactaaaacattacagaatacctccagtgaaggtagtcggctgcgcacgggtaaagatcgtaaccagaagaaagagaagccagacagcgtggatggtcagcaaccactcgtgaatggagtaccctaaactgcataattctgaagttatatttcctataccatttccgtaattcttattccatattagaaaactttgttaggccaaagacaaatagtaggcaagatggcacagggcatgaaatgaacacaaattatgctaagaattttttattttttggtattggccataagcaacaattttcagatttgcacaaaaagataccttaaaatttgaaacattgcttttaaaactacttagcacttcagggcagattttagttttattttctaaagtactgagcagtgatattctttgttaatttggaccattttcctgcattgggtgatcattcaccagtacattctcagtttttcttaatatatagcatttatggtaatcatattagacttctgttttcaatctcgtatagaagtcttcatgaaatgctatgtcatttcatgtcctgtgtcagtttatgttttggtccacttttccagtattttagtggaccctgaaatgtgtgtgatgtgacatttgtcattttcattagcaaaaaaagttgtatgatctgtgccttttttatatcttggcaggtaggaatattatatttggatgcagagttcagggaagataagttggaaacactaaatgttaaagatgtagcaaaccctgtcaaacattagtactttatagaagaatgcatgctttccatatttttttccttacataaacatcaggttaggcagtataaagaataggacttgtttttgtttttgttttgttgcactgaagtttgataaatagtgttattgagagagatgtgtaatttttctgtatagacaggagaagaaagaactatcttcatctgagagaggctaaaatgttttcagccaggaacaaatcttcctggtcgaaagttagtaggatatgcctgctctttggcctgatgaccaattttaacttagagctttttttttttaattttgtctgccccaagttttgtgaaatttttcatattttaatttcaagcttattttggagagataggaaggtcatttccatgtatgcataataatcctgcaaagtacaggtactttgtctaagaaacattggaagcaggttaaatgttttgtaaactttgaaatatatggtctaatgtttaagcagaattggaaaagactaagatcggttaacaaataacaacttttttttctttttttcttttgttttttgaagtgttggggtttggttttgttttttgagtcttttttttttaagtgaaatttattgaggaaaaatatgtgaaggaccttcactctaagatgttatatttttcttaaaaagtaactcctagtaggggtaccactgaatctgtacagagccgtaaaaactgaagttctgcctctgatgtattttgtgagtttgtttctttgaattttcattttacagttacttttccttgcatacaaacaagcatataaaatggcaacaaactgcacatgatttcacaaatattaaaaagtcttttaaaaagtattgccaaacattaatgttgatttctagttatttattctgggaatgtatagtatttgaaaacagaaattggtaccttgcacacatcatctgtaagctgtttggttttaaaatactgtagataattaaccaaggtagaatgaccttgtaatgtaactgctcttgggcaatattctctgtacatattagcgacaacagattggattttatgttgacatttgtttggttatagtgcaatatattttgtatgcaagcagtttcaataaagtttgatcttcctctgctaaattgatgttgatgcaatccttacaaatgattgcttttaaaattttaagctaggaaaagaaatctatagaaagtgttctgttacaaaatgtaactgttaccattggaaatttcacgtcataggaagttagcctttatctaccaactttcaagaacttgtttaataaagcgaaaaactcaaccaaatggtacaaaaccacagtgtaccattaaaatatgcactaagtctcttttttacaaaggctgtattcagcaaggcgctaacttgcttaaatgtgaattactaacttctaaaactgtactttgattcacatgttttcaaatggagttggagttcattcatattacaatatttgtgtgctaaacgtgtatgtttttcagttcaaagtcatgatgtttttaaaatcttattaaagtttcaaaaatctgaaaaaaaaaaaa

SEQ ID NO: 33 - DNA, 1616 bp, Homo sapiens
  CDS (73)..(1362)
gggggagcactagcagcagccggagtcggcggaaagcacccgggcgcagccggagccggtgccgcagctgcgatggccgtggccgtggggagaccgtctaatgaagagcttcgaaacttgtctttgtctggccatgtgggatttgacagcctccctgaccagctggtcaacaagtctacttctcaaggattctgtttcaacatcctttgtgttggtgagacaggcattggcaaatccacgttaatggacactttgttcaacaccaaatttgaaagtgacccagctactcacaatgaaccaggtgttcggttaaaagccagaagttatgagcttcaggaaagcaatgtacggctgaagttaaccattgttgacaccgtgggatttggagaccagataaataaagatgacagctataagccgatagtagaatatattgatgcccagttcgaggcctacctgcaagaggaattgaagattaaacgttctctcttcaactaccatgacacgaggatccatgcctgcctctactttattgcccctactggacattcactaaagtccctggatctggtcaccatgaaaaagctggacagtaaggtgaacatcattccaataattgcaaaagctgacaccattgccaagaatgaactgcacaaattcaagagtaagatcatgagtgaactggtcagcaatggggtccagatatatcagtttcccactgatgaagaaacggtggcagagattaacgcaacaatgagtgtccatctcccatttgcagtggttggcagcaccgaagaggtgaagattggcaacaagatggcaaaggccaggcagtacccctggggtgtggtgcaggttgagaatgaaaatcattgcgattttgtgaaacttcgagagatgctgatccgcgtgaacatggaggacttgcgagagcagactcacacccgccactatgaattgtaccgacgctgtaagcttgaagagatggggttcaaggacactgaccctgacagcaaacccttcagtcttcaggagacatatgaagcaaaaaggaatgaattcctgggagaactgcagaagaaagaagaagaaatgagacaaatgtttgttatgagagtgaaggagaaagaagctgaacttaaggaggcagagaaagagcttcacgagaagtttgaccttctaaagcggacacaccaagaaaaaaaaaaaaaagtggaagacaagaagaaggagcttgaggaggaggtgaacaacttccagaagaagaaagcagcggctcagttactacagtcccaggcccagcaatctggggcccagcaaaccaagaaagacaaggataagaaaaacttcttctttatgtaaccatcctgttgacaagccctactctctcctaatggacatagagcattagaagagcaggagctgtctgttcacacgtgttggggaagagttacctcatttccaccatcgcctcctgttcttttaaagtctgggccatatattgcactgctgtttgtacttgtcaatgtatgcccatagtggatactgaagtgacttaccactaccaaaaatagtcatattcaattatattaattaaaaaggataaaggaacttgg

SEQ ID NO: 34 - DNA, 1273 bp, Homo sapiens
  CDS (271)..(672)
taagcttgcggccgcaacgtctgcaagttcgcgctgcacagcggctacagcagctacagcctcagccgcgcgccggacggcgccgccctggccaccgcgcgcgcctcgccccggcaggaaaaggatgcgcctccacttagcaaggctgggcaggatgtggttctgcatctgcccacagacggggtggttctagacggccgcgagagcacagatgaccacgccatcgtccagtatgagtgggcactgctgcagggggacccgtcagtggacatgaaggtgcctcaatcagggggtgactccttggtggaaaagtctcagaaagccactgccccaaacaagccacctgcattatcaaacacagagaagaggaatcattccgccttttggggaccagagagtcaaatcattcctgtgatgccagatagtagttcctcagggaagaacagaaaagaggaaagttatatatttgagtcaaagggtgatggaggaggaggggaacacccagccccagaaacaggtgcagtgctacccctggcgctgggtttggctatcactgctctgctgcttctcatggttgcatgccgactacgactggtgaaacagaaactgaaaaaagctcgtcccattacatctgaggaatcggactacctcataaatgggatgtatctatagtaatgtaatttcaataccttggggcagggacatgttttgtttataatttatacatctattaagttctggatatttacagcttcttttgtttttaattgggccagaagattctgcaaatcccaaatctttctttattatttattgtaaaaaaaaggttccttagaagtcataaaatattttgaaatttagagaggaattcatgattaaagattcctaaaaatataattctgatttatgtaagctgtccctgaaaatagaaatgtgtacttagctgagagaaaattcagcatctcaggaggtggtattaggatgactgtgttaacccattaccttttagaagccaactgttggccccttaccatgctggactgctataggcccagcttccccttgttctgtggcccttttcttcctccttgaagctcccagtattctttttcttttcccctctaaacctgtttctgagagtggatctcaagcaagttcatgccttcaatcagatgttacttagggtgggtatacctaaattataaaccttatgtacaagtcaggtcgacgcggccgcgaattccagatctatgaaccgtagatactgaaaaag

SEQ ID NO: 35 - DNA, 1611 bp, Homo sapiens
  CDS (1)..(1377)
atggagcgcggccctggggcccgggggcgcgggccggggtgtggggccctggccacctcggtgtgccccttcgtctccggggtctccaggggcctgctgctgtccactgggctctcaggacccagctgcatgatgccacctaaactgcagggccctccaagtccccagcaccagcggggcagcaccgagcctttgtttgttgtatttcctctgtctccagacatcgcaggccggccgggcggcgttgttggcgggggccccggtggaggcccggcctgggcggcgcccgccatgaatgggctgtcgctgagtgagctctgctgcctcttctgctgcccgccctgccccggccgcatcgctgccaagctcgccttcctgccgccggaggccacctactccctggtgcctgagcccgagccggggcctggtggggccggggccgcccccttggggaccctgagagcctcctcgggcgcacccgggcgctggaagctgcacctgacggagcgtgccgacttccagtacagccagcgcgagctggacaccatcgaggtcttccccaccaagagcgcccgcggcaaccgcgtctcctgcatgtatgttcgctgcgtgcctggtgccagacaaggacaccaggctcagggaggccatccccagctggcatgggtgggcaggctgggcgactccaacaacccagcgcctggtggttgcctgctgggcaagagctggggcacaggggctgccctggcctgcgggtacatccaccttctcgccaggtacacggtcctcttctcgcacggcaatgccgtggacctgggccagatgagcagcttctacattggcctgggctcccgcctccactgcaacatcttctcctacgactactccggctacggtgccagctcgggcaggccttccgagaggaacctctatgccgacatcgacgccgcctggcaggccctgcgcaccaggtacggcatcagcccggacagcatcatcctgtacgggcagagcatcggcacggtgcccaccgtggacctggcctcgcgctacgagtgtgccgcggtggtgctgcactcgccgctcacctcgggcatgcgcgtcgccttccccgacaccaagaagacctactgcttcgacgccttccctaacatcgagaaggtgtccaagatcacgtctcccgtgctcatcatccacggcacggaggacgaggtgatcgacttctcgcacgggctggcgctctacgagcgctgccccaaggcggtggagccgctgtgggtggagggcgccgggcacaacgacatcgagctctacagccagtacctggagcgcctgcgtcgcttcatctcccaggagctgcccagccagcgcgcctagcggcggccccaaccggccggacctcagcaataaggcggcccccggacctcaccccgcgccggcccccacccaggggctgcatgtggaccccccgggcggcccaggggaccccgccccgacccaggggctgtggacgatgtacaggcaacagagctacgcactcctttccttttggaagcaagaagaaaatacgtgaaaacggaaattaaagatttaaaattttaaaaaaaaaaa

SEQ ID NO: 36 - DNA, 1333 bp, Homo sapiens
  CDS (33)..(1019)
ctgcatccttggaacatggagggagtggaggaatggcccttggggagggaaagtcccactgtggggaggataggaaagagcataacaatgcctgccaccaggaggaagaggccccagatgtcaacccattgcatggtttgcaggcatcgggatcaccgggaaagactcaaagaatcaagtcacaggcactggagggaacaaggctttactcacatagcgaagagacaagatcaggcttaatacgactattgcgcctgcgccagcgccggctgcgagactggggccgtggctgctggtcccgggtgatgctaggcggctccctgggctccaggctgttgcggggtgtaggtgggagtcacggacggttcggggcccgaggtgtccgcgaaggtggcgcagccatggcggcaggggagagcatggctcagcggatggtctgggtggacctggagatgacaggattggacattgagaaggaccagattattgagatggcctgtctgataactgactctgatctcaacattttggctgaaggtcctaacctgattataaaacaaccagatgagttgctggacagcatgtcagattggtgtaaggagcatcacgggaagtctggccttaccaaggcagtgaaggagagtacaattacattgcagcaggcagagtatgaatttctgtcctttgtacgacagcagactcctccagggctctgtccacttgcaggaaattcagttcatgaagataagaagtttcttgacaaatacatgccccagttcatgaaacatcttcattatagaataattgatgtgagcactgttaaagaactgtgcagacgctggtatccagaagaatatgaatttgcaccaaagaaggctgcttctcatagggcacttgatgacattagtgaaagcatcaaagagcttcagttttaccgaaataacatcttcaagaaaaaaatagatgaaaagaagaggaaaattatagaaaatggggaaaatgagaagaccgtgagttgatgccagttatcatgctgccactacatcgttatctggaggcaacttctggtggtttttttttctcacgctgatggcttggcagagcaccttcggttaacttgcatctccagattgattactcaagcagacagcacacgaaatactatttttctcctaatatgctgtttccattatgacacagcagctcctttgtaagtaccaggtcatgtccatcccttggtacatatatgcatttgcttttaaaccatttcttttgtttaaataaataaataagtaaataaagctagttctattgaaatgcaaaaaaaaaaaaa

SEQ ID NO: 37 - DNA, 1079 bp, Homo sapiens
  CDS (2)..(703)
aatggaggacttgacgcgtagcgaccggaccggaattcccgggacgacgatttcgagtgctgagctctccgcgtcgcctctgtcgcccgcgcctggcctaccgcggcactcccggctgcacgctctgcttggcctcgccatgccggtggacctcagcaagtggtccgggcccttgagcctgcaagaagtggacgagcagccgcagcacccgctgcatgtcacctacgccggggcggcggtggacgagctgggcaaagtgctgacgcccacccaggttaagaatagacccaccagcatttcgtgggatggtcttgattcagggaagctctacaccttggtcctgacagacccggatgctcccagcaggaaggatcccaaatacagagaatggcatcatttcctggtggtcaacatgaagggcaatgacatcagcagtggcacagtcctctccgattatgtgggctcggggcctcccaagggcacaggcctccaccgctatgtctggctggtttacgagcaggacaggccgctaaagtgtgacgagcccatcctcagcaaccgatctggagaccaccgtggcaaattcaaggtggcgtccttccgtaaaaagtatgagctcagggccccggtggctggcacgtgttaccaggccgagtgggatgactatgtgcccaaactgtacgagcagctgtctgggaagtagggggttagcttggggacctgaactgtcctggaggccccaagccatgttccccagttcagtgttgcatgtataatagatttctcctcttcctgccccccttggcatgggtgagacctgaccagtcagatggtagttgagggtgacttttcctgctgcctggcctttataattttactcactcactctgatttatgttttgatcaaatttgaacttcattttggggggtattttggtactgtgatggggtcatcaaattattaatctgaaaatagcaacccagaatgtaaaaaagaaaaaactggggggaaaaagaccaggtctacagtgatagagcaaagcatcaaagaatctttaaggaaggtttaaaaaaaaaaa

SEQ ID NO: 38 - DNA, 3373 bp, Homo sapiens
  CDS (1345)..(2475)
ctatctacccattgacaacaccttcggtcttctcacaaatattgagtagaaacactgccaactcttcacctttatctggctcattcccagagccaggagaagatgtgacttatttggtggatgggaaatcttatccattggtcccatcaaatccattggtccacgtttgcctgtcccagatataggtccctcctttatttctgtggctatatttgaaacagaatctttgtcgtcacttgtagccttctcagctcgttgtttctgaggagacactgcccaccagcttcttaggctcttagagccagctagcttcagctctgcttttggtccgatgaagaggtccccctccagggctccagccatcacccgcatgtgcttcggccgcccgacactgttaggacggataacgtcagcaaggtgggcagggagcatggcagagcttgtgtccagaaaaaccgaaatccaaccatagtcgcccagagggtacctggcctccaaacaccaggatgtggctggggggcacaggttggaactggggcctatggggttcggggcttggatccagcagagaacaaagaagagggccatggctctgctcatctttgccttagtccataaaccatcatggagaagccagtcttctgatggcccttcagattcagcagctgtggactccagggtaccacggaacctaacggtccgggctccatctcttttgcttctgctgctggcctttgcaaagaggaaacctggaggttgaagagggtctaaaatctccatcctgagtttgcaaatgctgaaagcgtaacctggttgatcagtacaaatacccaggggtggaagtgccgaaggagcgtggcccgaggtgctgggacgcgggaaagacgtctttctggaccggtgctgggacgcgggaaagacgtcttcctggaccggtgaatttccagctccacagactccggccgcgcgcacaccagcccagctccactttctgccgcccgcgtcccctttaagacggagccatgacatcatcccagacactgcgcagctaccttggcaacgcgcgaccacttttttccggacgacctcaattggctggccagctccggagccccgccccttcgcgcagcagccccgggcacctgctgtcaatcgggccaggtgggagcgatgattggccgccggccggccctccagaaagcccgcggctcgcgtaggctgcaggctcggggagggagggcagcgcgccgcgtcggagccgccgccgtcccggtcctcccgcccgcccgcccatccggtgcctcctgcagcccgcctgctgggcagggccggcgcggcccggccatggagtcctacgacatcatcgccaaccagcctgtggtcatcgacaacggttcgggggtgattaaagctggctttgcaggagaccagattcccaaatactgtttcccaaactatgtcgggcggccgaagcacatgcgggtgatggctggagccctggagggggacctcttcatcggaccaaaagcagaggagcaccgggggctgctgaccatccgctaccccatggagcacggcgtggtgcgagactggaacgacatggaacgcatctggcagtacgtctactccaaggatcagctgcagaccttctcggaggagcatcctgtgctcctcacggaggccccgctcaacccgagtaagaaccgggagaaggcggcagaggtgttctttgagaccttcaacgtgccggccctgttcatctccatgcaggctgtgctcagtctgtacgcaacaggacgcacgacaggagtggttctagactcaggggacggggtcactcatgctgtgcccatctatgagggctttgccatgcctcactccatcatgcgggtggacattgccggccgcgacgtctcccgctacctccgactcctgctgcgcaaggaaggggttgacttccatacctcggctgagtttgaggttgtccggacaatcaaagagcgagcgtgctacctgtccatcaacccacagaaggatgaggctctggagacggagaaggtgcagtacacgttgccagacggcagcacgcttgatgtggggcctgcacgattccgggcccccgagctgctgttccagccggaccttgtgggggatgagagtgaggggctccatgaggtggtggccttcgccatacacaagtccgacatggacctgcgccggacgctgttcgccaacatcgtgctctcaggtggctcaacgcttttcaaaggcttcggagaccgattactcagtgaagtgaagaagcttgccccaaaggatatcaaaatcaagatctcagccccgcaggaacggctgtactccacatggattggcggctccatcctggcctcgctggacacttttaagaagatgtgggtgtccaaaaaggagtatgaagaggatggctcccgtgctattcatcgcaaaactttctagtgcccaaggagggcggggcatgttgggaaagggggagggaggggagacagagcctttaaccctttttggtcttggctcgtatactaggcttagggtcccctgcatgccctgaacccctgggtgggtggcacagcagtgcccccctgcagccttcccctctacacaggacatgcacacacaagtaacattgagctgcatggacaggagccttgagctggcgtgtgggaattgagcgccatgtcaggctgttgtgggtatccccctggcagggccagctaggcctgtggttccctgctccgactctcagggctgcctccctgagctccagggccagaatgcctggatgcctgggtagccagtttggggagtgggctgcaaggggcagccagcagctcccactggtgtgtcactgcatccattgccacctcctgttcgtgacctgacagggtgacacagcccctttcacactctgtcctcctatcttcctgggtagatgccctggtgtagggctgagtactgaatggtcttccatccccagcaagggggtgcagcccagggtcaggcccttcagagccagggcagaggacgcacggtggctagagccgctgcactatccttttcagagcacttcatccacttgctcctccctctaccctcggcaccctgggtgggaaagggttgatgctcatcatttattgaggggaagccacttaataaggagtcagacctaaaagggggtgggggacattttcttacctcacccaagaaagaggtcgtcacttttgctgtggccagggccccacctccctctctcagatatgtacaataatttaacacggttgcctgaaaaaaacttttgtaaatcattatagtaataattatggacaaaaaaaaaaaa

SEQ ID NO: 39 - DNA, 2125 bp, Homo sapiens
  CDS (52)..(1509)
taagcttgcggccgcgggctagcaagctcccggagccggcggcgcaccaccatgacccagtcggtggtcgtacaggtcggccagtgcggaaaccagatcggctgctgcttctgggacctggcactaagggagcacgccgcggtcaaccagaaaggaatttatgatgaggcaataagcagcttctttagaaatgtggacaccagagtggttggtgatggtggaagtatttccaagggaaaaatatgttctttaaaagcacgagcagtcttgattgatatggaagaaggggtagtgaatgaaattctgcagggaccactgagagatgtatttgatacgaaacagctcatcactgatatttctggctcaggaaataattgggccgtgggtcacaaagttttcggcagtctttaccaagaccagattttagagaaattcagaaagtcggcagagcactgtgattgcttgcagtgtttctttataatacattccatgggaggaggaacaggatctggacttggcacatttcttttaaaggtgcttgaagacgaattcccagaagtatacagatttgtgacttccatttatccttctggtgaggatgatgtcataacctcaccttataatagcatcttggcaatgaaggaacttaatgagcatgcagactgtgtattgcccattgacaatcaatctttatttgacatcattagcaaaatcgacctcatggtgaattctggaaagttgggtacaactgtgaagccaaagagtctggttacttcaagttctggggctttaaaaaagcagcataagaagccctttgatgcaatgaataacattgtggcaaatttgctcctcaacctaacgagctctgcaagatttgaagggtcccttaatatggaccttaatgaaatcagcatgaatttagttccttttcctcaacttcattatctcgtgtcaagcctaacacctctgtatacactgacagatgttaacattcctcctagaagattggatcagatgttttcagatgcctttagtaaagatcaccagctgcttcgggcagaccccaaacacagtctttacctcgcctgtgcactcatggttagaggaaatgtacaaatttcagatcttcgtagaaatattgaaagattaaaaccatctctacaatttgtctcctggaatcaagaaggctggaagaccagcctgtgttccgtacctcctgtgggccattctcattcgttattagctttagcaaataacacatgtgtgaagcccaccttcatggaactgaaagagagattcatgaggctctacaagaaaaaggctcaccttcatcactatctacaagttgaagggatggaagaaagctgtttcacagaagctgtgtcatctttatcagcactcatacaggaatatgaccaactggacgccacaaaaaaacatgcctgtgcaggatttacccagactaagcatagctatgtgaaaaagaaaccctcaaaaatactttcttaatttcacattgttttttctgacctttctgtttcaacatttttgtaatttggaaactccagttttttcatattatcgggaaatatttttgtctaaaagagtgatttctgtttaatcgcaatttgttggtaataccaatgtgtgaaattagtgaaatcttagtaccttaacttcaaacatttctcttcagaaaagttcccttttctaaaattgagataacatagttcttgaatattttgctgtatttatagcctcatatttaggcatttatgcactgatgtgtcttcaataaaaatcttgtacagatatatttttataattatttataatttatattttgatattctatttaagttatcctgattctttaaaagtagttattgggagtagaagaacacaatataaatatttccgtgtaatagccaccaacttttcaggcataggttttattacaactgttaaggaggttttgcttcttctttagataacaacttgtttgcccaaaagaatcctaatttgtacacttaacatgtatttgtattaaactttttaaataattgctttcttatcaaaccaattgattttataataaatgtctatatttttcaaaaaaaaaaaa

SEQ ID NO: 40 - DNA, 2165 bp, Homo sapiens
  CDS (8)..(1726)
accggccatggcggccccccgcccgtctcccgcgatctccgtttcggtctcggctccggctttttacgccccgcagaagaagttcggccctgtggtggccccaaagcccaaagtgaatcccttccggcccggggacagcgagcctcccccggcacccggggcccagcgcgcacagatgggccgggtgggcgagattcccccgccgcccccggaagactttcccctgcctccacctccccttgctggggatggcgacgatgcagagggtgctctgggaggtgccttcccgccgccccctcccccgatcgaggaatcatttccccctgcgcctctggaggaggagatcttcccttccccgccgcctcctccggaggaggagggagggcctgaggcccccataccgcccccaccacagcccagggagaaggtgagcagtattgatttggagatcgactctctgtcctcactgctggatgacatgaccaagaatgatcctttcaaagcccgggtgtcatctggatatgtgcccccaccagtggccactccattcagttccaagtccagtaccaagcctgcagccgggggcacagcacccctgcctccttggaagtccccttccagctcccagcctctgccccaggttccggctccggctcagagccagacacagttccatgttcagccccagccccagcccaagcctcaggtccaactccatgtccagtcccagacccagcctgtgtctttggctaacacccagccccgagggcccccagcctcatctccggctccagcccctaagttttctccagtgactcctaagtttactcctgtggcttccaagttcagtcctggagccccaggtggatctgggtcacaaccaaatcaaaaattggggcaccccgaagctctttctgctggcacaggctcccctcaacctcccagcttcacctatgcccagcagagggagaagccccgagtgcaggagaagcagcaccccgtgcccccaccggctcagaaccaaaaccaggtgcgctcccctggggccccagggcccctgactctgaaggaggtggaggagctggagcagctgacccagcagctaatgcaggacatggagcatcctcagaggcagaatgtggctgtcaacgaactctgcggccgatgccatcaacccctggcccgggcgcagccagccgtccgcgctctagggcagctgttccacatcgcctgcttcacctgccaccagtgtgcgcagcagctccagggccagcagttctacagtctggagggggcgccgtactgcgagggctgttacactgacaccctggagaagtgtaacacctgcggggagcccatcactgaccgcatgctgagggccacgggcaaggcctatcacccgcactgcttcacctgtgtggtctgcgcccgccccctggagggcacctccttcatcgtggaccaggccaaccggccccactgtgtccccgactaccacaagcagtacgccccgaggtgctccgtctgctctgagcccatcatgcctgagcctggccgagatgagactgtgcgagtggtcgccctggacaagaacttccacatgaagtgttacaagtgtgaggactgcgggaagcccctgtcgattgaggcagatgacaatggctgcttccccctggacggtcacgtgctctgtcggaagtgccacactgctagagcccagacctgagtgaggacaggccctcttcagaccgcagtccatgccccattgtggaccacccacactgagaccaccctcccccacctcagttattgttttgatgtctagcccctcccatttccaacccctccctagcatcccaggtgccctgacccaggacccaacatggtctagggatgcaggatccccgccctggggtctggtcctcgcccatcctgcagggattgcccaccgtcttccagacaccccacctgaggggggcaccaggtttagtgctgctgctttcactgctgcacccgcgccctcggccggccccccgagcagcctttgtactctgcttgcggagggctgggagaccctccaggacattcccaccctcccccatgctgccaagttgtagctatagctacaaataaaaaaaaaccttgttttccagaaaaaaaaaaaa

SEQ ID NO: 41 - DNA, 2273 bp, Homo sapiens
  CDS (141)..(1064)
ctctgccgtaccggtccggaattcccgggtcgacgatttcgtgcgactctcacaccctgagctccggtgctcctttcctaactccactggctgcggcatctgtgggaaaagtgtggctgggtcttcgaggagccgcaccaatggcttccgtgctgtcctacgaaagcctggtccacgccgtggccggagccgtgggaagcgtgacagcaatgacagtgttttttcccctggatacagctagacttcgacttcaggttgatgagaaaagaaaatccaaaactacacacatggtgctcctggagatcattaaagaagaaggactcctggcaccatatcgagggtggtttccagtgatttccagtctctgctgctccaattttgtctatttctacacttttaatagcctcaaagcactctgggtcaaaggtcaacattctaccactggaaaagatctggtagttgggtttgttgcaggagtggttaatgtgttgctaacaactccactctgggtggtaaacaccagactgaagcttcaaggagcaaaatttaggaatgaagacattgtaccaacaaactacaaaggtatcattgatgcttttcatcagatcattcgcgatgaaggaatctcggctttatggaatggcacatttccctcattgctgttggtcttcaatcctgccatccagttcatgttttatgaaggtttaaaacggcagcttttaaagaaacggatgaagctttcttccttggatgtgttcatcattggggcagtagccaaagcgattgccaccacggtgacctatcccctgcagacggtacagtcaattctgaggtttgggcgtcatagactaaacccagaaaacagaacattgggaagtcttcggaatattctctatcttcttcaccaacgagtaagacgttttggaataatgggactctacaaaggccttgaagccaaactgctgcagacagtcctcactgctgctctcatgttccttgtttatgagaaactgacagctgccaccttcacagttatggggctgaagcgtgcacaccaacactgagacgccttcccatgaaaaattccgaagatgctcaagagggaggtttcctcctgagtgaagagaagtgattctcccttgactctggctcctgccaccacaaatgttaccctcattggcttgaaaagcatccaagggtgcacagggagtatggccaactggacctgttgtcaccttaattgtcatgctggctggttggattttggggtggcagttggactaatgtgaaaaaaacattgctgaaaacctaaaaatgaaagtttgtgagtgtttattggttttcttaagagaaatggactattttgctctcatgtgtaatgttttctatttaaatctttcttaaatataccagctgttctctttccctgaactctcccccaggttctaggacaaatttaataacatgtaattctcctcaaatacttttgtatgtctcagtgttggtgttttcctccctaaaactaacattagggctgtgccacgggcatgactttatttttgttgggcttttttttccctgcttaaggagaggtgtcttttttggatatgagctatttattttgtgaaatgaaaattgttcacccaaatgattctcttataaactatttgtaaatgtcacttattcattagtgtttgacataatttttagaatatttattttgaatcaatcctttcattacgaaagacttgaagttttgtgtccattcttacaagccctggtcagtcaagtcccaataaatggtcagcacaaaaaagatattcttgaaaattgctctttattaaggtattacgttgagtttgcaaccagatgggaaaaatcacaaaaatgagaaggggagcagatatcttgttgaggtctggatattatctccctttataaacttggtgtaggccgtatattttgaaaataaacatctggttgaggttatttcatttggaaaccttccttagagtcctgttgctcagtgtggtccatcagacggtagtactgccacaagctgagagcttgctgggcacgcaacccagagtttctgaatcctgttccgtattttaacattcccaggtgattcacagccacattaaagttcaggagaccataggacccctgacccatgagaagaagtgattggtttcgattatagacatcaagataaagatttttctcaaaggaaagagattaatgtattaaaacaacctctgaaaaaaaaaaaa

SEQ ID NO: 42 - DNA, 5885 bp, Homo sapiens
  CDS (152)..(2968)
actcgtctacattctttttgtaaagtgatgcgaatatttgtaaagtctaagcaaattggttgagttcctgaccataaatgctttatgataattttttaggtatatttgattttaaaagttttatgcttgcttttaaacttaacttcgaccaatgacttcctttttctcagagtctccacagcctattggctcacttggacatgatgctgacttgaggcggcagcagcaggatacctgtaactccggcattgctgacatccataggctgtttaattggttatcagaaacactagcaaatgcgcgccattctgatgcatctctgacagacacagtcaacaaagccttaggattgagcactgatgatgcctatgaagagctgaggcaaaaacatgagtatgagttgaactctaccccagataagaaagactatgagcagcctacttgtgcaaaagttgaaaatgcacagtttaagggtactcagagcttattactagaagttgatgcaacatctaagtattctgttgctatttctaccagcgaagtgggcactgaccataagctacatttgaaagaagatccaaatttaattagcgtgaataattttgaagattgcagtttgtgtcccagtgttcccattgaacatggatttcgtagacaacagtctaagtcaaataatgttgaagagactgaaatacattggaaactgattccaattacaggagggaatgcaagaagcccagaagaccagctggggaaacatggtgagaaacaaacaccaggtatgaaatcaccagaagaacaactggtgtgtgtgccaccacaggaggcctttcctaacgacccccgggtaataaatagacagagaagttctgattaccagtttccatcctctccatttacagacacactaaagggcaccactgaggatgacgtgttgacaggtcaggtggaggagcagtgtgtgccagcagcagaggcagagccgcctgcagtgagcgaaaccacagagaggacagtgttaggagagtacaatctcttttctaggaagatagaagagattttgaagcaaaagaatgtttcatatgtcagtagagtttccacacctatcttttcaacacaagagaagatgaaacggctttccgagttcatatattctaagacttccaaagctggtgtgcaggagtttgtagatggtttgcatgagaagctaaatactattattattaaagcatcagccaagggtgggaatttgccaccagtcagtcctaacgattctggtgctaagatagcatcgaatcctctggaaaggcatgtcataccagtttcctcaagtgacttcaacaataaacatctccttgagccactgtgtagtgatcctttgaaagataccaactctgatgagcagcattccacttcggctttaactgaagtagaaatgaaccagcctcaacatgccacagagttaatggtgacttctgatcatattgtacctggtgatatggcccgggaaccagtagaagaaacaacaaaatcccccagtgatgtaaacatttctgctcaaccagctctttcaaattttataagccagttagaacctgaagtatttaatagtttggttaaaatcatgaaagacgtccagaaaaatactgtgaaattttatattcatgaagaagaagagagtgtgctctgtaaagaaataaaggaatatcttatcaaattaggcaatacagaatgtcatcctgaacagtttttggaaagaagatcaaaattagataaactattgattattattcaaaatgaagacattgcaggtttcattcacaagatacctggcttggtgactttaaagaagctcccctgtgttagttttgctggtgttgatagcctggatgatgttaaaaatcatacatacaatgaattatttgtatctggaggttttatcgtatctgatgaatcaattctaaacccagaggttgtcacagttgagaaccttaaaaattttttgacattccttgaggaacttagtactccagaaggaaaatggcaatggaaagtccactgtaaatttcagaagaaactaaaggaactaggcagattgaatgctaaagctctaagtctgttgacgcttctgaatgtctatcagaagaaacatctggttgaaattttgtcataccacaattgtgattcacaaactcgaaatgctccagaattggattgccttatcagacttcaggctcagaacatacagcaacgacacatagtctttttaacagagaagaacatcaagatgctttccagttatacagataatggaatagtggttgcaactgctgaagacttcatgcaaaactttaaaaatcttgtgggctatcacaattcaatcacagaagaaaaccttccacagcttggtgctaatgagaatcttgagtcgcagtcagctcttttagaaaacgatgaaaaggatgaagaggatatgtctctggattcaggggatgaaatctcacatatagaagtatgcagcaattttcattcagaaatatgggagaaagagaccaaaggatcacgtggaacagatcaaaaaaagaatactcaaattgagttgcaatcgtctcctgatgtgcaaaacagtttattagaagataagacttaccttgattctgaagagagaacttctattgatatagtatgctctgaaggagagaacagcaattcaacagaacaagattcatatagtaactttcaggtttatcatagtcaattaaatatgtcccatcagtttagtcattttaatgttctcactcatcagacatttttggggacaccatatgccctttcatcaagtcagtctcaagaaaatgagaattacttcttatctgcttatactgaaagcttggatagagataaatctccacctcccttaagttgggggaaaagtgattcttccaggccatattcacaagagaaataactgtagtaactttttttttaagagattgttgtggactttgtttattaacaatttatatttcattctctaaacaaaaggttcttgttctttctcaaatgttttttcttttatttaaatcatgatggcctgtaacagttgaagcatctaaaaattgaaataaatatatatttttaacatatattgtacttgaattatctcatgttggcacttctaagttttactttttgtatgttacctgtacttaggcttcaaattgaagcctgttttatgtgtaaaatcagatgcttgcaggaggacggtaaacagcaaaggctttacttctttttctctaatgtcacctgatataaagtacttttgttgaagtgaattattttgatgtaggcttttgtatactgtgtttacacaggtataagtcagtaatagcagtgttaatatttacaggattttggctcgatacctcaagatttatctaacagtgcagtttcatttagataataaactatgtacataggacacattttttatctctaggcttagtcatgtaaaaactgcctattgctaaaattctggtaactttttgagagtattggataattttcagtacctgcgcaatccttgatttaatgaaattaaattttttatttcaaaagataggcttctgtttatcaaaggcgttgaacaatttgatttttaaattagttttagcaaaatggaagtataatgggaatatatttttgaggtggtcttagtagtaattaccatttgttgaacacattaatgctatactagacagatacagtggagatagctttcaaacccgtatctattcctaactactgcctctaatactaattactaacttgttactaatgctaacttttaaaaatgtttttgaaaattgcaatttctacaaataaatgtcatagtgcaaataaatgtcaggatttagagaaggagcctaaactgaatttgtgttatttcagtaaaagttatggagttatgggtctagacgtgttaataagttagacagaactttggcactttagaacaaatgcatgagtggtatttcagttcctaagttacataaaaagtgtgaaagaacactgtgaggtcccagcaacgccagactatattaaggtaagtagaaagtgtttttatagggcttcaatacccaggtggtgacagagcagaagaaccggttttttttttttttttttttactactaagcttttacaaaagaagtatctgttttattgtatagaacaagtacagcattttactacatagtatacaagtttttaatgagcatttaaaaaaataagtaaatctaggctatttgaaaaatacagttgagccagtgagcacattttataatttggaagacacaaatcaaatgtgaaggatttgattttctacatttaaaatgaagaaccaaaactctcttcttgattttcagctaaaggcaggagactactttccaactccttttgcttctggagaaggccctgaaatcacattgatatatgtttgttagtaaaatgtgcacacctgacttgcaatgttgtgttaaactagaattatattcacttggaaaacatatcgcttaggataaaattttgtcattcaaaaattttttcagaaatgcttgtactagaccacctcatttggatatatagctatcacatttgtaagattctgtttttagcataaaaatcaatagggatgaaaattttcttagaactcaagactccataactatgggggtaaatgaagtcatcccttctcccccagtccacccccaagtgctcttagatactgaaggagtctcccttaacatacagtgttttttttttgttgttgtttttttgtttttttttggagatggagtctcgctctgtcgcccaagctggagtacagtggtgcaatctcactgcaagctctgcctcccaggttcacaccattctcctgcctcaacctcccgaatggctgggactacaggcacccaccaccacgcctggctaactaactaactaactttttgtatttttagtagagacagggtttcactgtgttagccaggatggtcttgatctcctgacctcatgatctgcctgcctcagcctcccaaagtgctgggattacaggcttgagccactgctcctggccaacatccagtattttatcttgactgtcctaaccttaccttagatgctaacagaagggtcctgctcaaataacactgggtgctatattgatgggtaaatgtgtacatcctattccttcctctttatctcacaatttttgtctccactaagcaagaagtaaactaacacttcgtcactctaaagaaataacttatgtaaaactcttagtaaccctgtttgtcttcaaatgagtaaatagaccaaagtggggggacaattttctagttctgtagagggaaaaacatctgagtcaacattttcaaatgcagagggtattggtacatgacgacatggaaaagggcacttttaaacacagcttactcttcctcaagtacagagagtatatagtgaatcaaaactaactacagccattctttttaaagcccaagggatggagcaaaggtgtaaggatgttacctgtttgttttaatcagagagcaaaaagaagtcacaatagtttgggagaaaaagtagtatggtgagtaaggttatgcgtataatttcatactgaatttattactatttgggatgtacgtcaatgttctaacaaacactgccaacacgtcaattttttaaaaagcgtgggccacattgctaagaatttgttaaagcataactgtattttttgttttagggccttattgatgttttgccgttccaatgtatgcatttttttactcaataaacttgtcttaattttaaaaaaaaaaaa

SEQ ID NO: 43 - DNA, 1174 bp, Homo sapiens
  CDS (42)..(449)
tactactactaaattcgcggccggtgcgacggctgccgaagatggcggaggtgcaggtcctggtgcttgatggtcgaggccatctcctgggccgcctggcggccatcgtggctaaacaggtactgctgggccggaaggtggtggtcgtacgctgtgaaggcatcaacatttctggcaatttctacagaaacaagttgaagtacctggctttcctccgcaagcggatgaacaccaacccttcccgaggcccctaccacttccgggcccccagccgcatcttctggcggaccgtgcgaggtatgctgccccacaaaaccaagcgaggccaggccgctctggaccgtctcaaggtgtttgacggcatcccaccgccctacgacaagcccctctctttctctaacagaaaaagcggatggtggttcctgctgccctcaaggtcgtgcgtctgaagcctacaagaaagtttgcctatctggggcgcctggctcacgaggttggctggaagtaccaggcagtgacagccaccctggaggagaagaggaaagagaaagccaagatccactaccggaagaagaaacagctcatgaggctacggaaacaggccgagaagaacgtggagaagaaaattgacaaatacacagaggtcctcaagacccacggactcctggtctgagcccaataaagactgttaattcctcatgcgttgcctgcccttcctccattgttgccctggaatgtacgggacccaggggcagcagcagtccaggtgccacaggcagccctgggacataggaagctgggagcaaggaaagggtcttagtcactgcctcccgaagttgcttgaaagcactcggagaattgtgcaggtgtcatttatctatgaccaataggaagagcaaccagttactatgagtgaaagggagccagaagactgattggagggccctatcttgtgagtggggcatctgttggactttccacctggtcatatactctgcagctgttagaatgtgcaagcacttggggacagcatgagcttgctgttgtacacagggtatttctagaagcagaaatagactgggaagatgcacaaccaaggggttacaggcctcgaccatgctcctcacctgtattttgtaatcagaaataaattgcttttaaagaaaaaaaaaaa

SEQ ID NO: 44 - DNA, 5820 bp, Homo sapiens
  CDS (1)..(5820)
atgcccatagaaggcattgtgacatatcaccagtcacatcactcaggtgggattttgacatataactgcacccagcacacaggtgagattgtgactcttgtatgctcatcctgccaaaagttgagtgtcaccctcacacatggacagagacttctgaagcagttactgagcctcaaatctgctaagattgccctgtgtgagagtctcatctctggtagagaaagagctgaaattgtgcaaaaacagacacaaactcttattatgctagtggctgacctgcaacaaaaggtgtatgcacagcctcgccaggtgtctactgttagagtgagcgcattgattggaaaagaatgggaccctgccacttggaatggggacgtgtgggaggaccctgatgaagctaggggctctgagtttgtaaactctgatgagccttttttggaaggtccagaagatatacccttgaccattgccttgcaaaatagatttgtgaaggcagcacctgaatctttgaagaaccttataattgctcttctctgcatgtcggatctaacagtgggaaccccggtcactcaactacaaaatttaaatacagtgggaataattggatcccatggatatctctggccttttatgagggttattgtgcactggggaaagggaaatgattggacattttggggactcctaaacactggctctgagctgacattgattccaggggacccaaaacatcactgtggtcctccagttaaagtagaagcttatggaggtcaggagacagatggattttggagaatgacagtggattatcatgaggttaatcaagtggtaactccaattgcagctgctgtaccagatgtagtttcattgcttgagcaaattaccacatctcctgataactactctccttttgagagacaactcttggcctattactgggctttggtaaaaactgaacttttgactatgggttgtcaagtcaccatgcgacctgaactgcctatcatgaactgggtgctttctgacccatctaaccataaaggcctgaaagggcggggccttaaacattatccaatcagggatgctgggctgggaacgtccaatcaggcaggcagctggaggggacaggtcggcttccgggatgtggtcggtcctttgtctctcgctgcagccggaggtcaaggtctcgtccttactgctgtgtgtcctctgctcctagagtcccagcctctgtggccctatgacctgcagggatcattgacatttagggatgtggccatagaattctctctggaggagtggcaatgcctggacactgcacagcagaatttatatagaaatgtgatgttagagaactacagaaacctggtcttcctgggtattgctgcctttaagccagacctgatcatttttctggaggaaggaaaagagtcctggaatatgaagagacatgagatggtggaagaatccccagttatatgttctcattttgctcaagatctttggccagagcagggcatagaagattctttccaaaaagtgatattgagaaggtatgaaaaatgtggacatgagaatttacacttaaaaattggttataccaatgtggatgagtgtaaggtgcacaaagaaggttataataaacttaaccagagtttgacaactacacagagcaaagtatttcaacgtggcaaatatgcaaatgtctttcataaatgttcaaattcaaacagacataagataaggcatactggaaagaaacatttgcaatgtaaagaatacgtcagatcattttgcatgctttcacacctatctcaacataaaagaatttatactagagagaattcctacaaatgtgaagaaggtggcaaagcttttaactggtcctcaacccttacttattataagagtgctcatactggagagaaaccctacagatgtaaagaatgtggcaaagcctttagtaagttctcaatccttactaaacataaggtaattcatactggagagaaatcctacaaatgtgaagaatgtggcaaggcttttaaccaatctgcaatccttactaaacataagataattcatactggagagaaacccaacaaatgtgaagaatgtggcaaagcctttagtaaggtctcgactcttactacacataaggcaattcatgctggagagaagccctacaaatgtaaagaatgtggcaaagccttcagtaaggtctcaacccttattacacataaggcaattcatgctggagagaagccctacaaatgtaaagaatgtggcaaagcctttagtaagttctcaatccttactaaacataaggtaattcatactggagagaaaccctacaaatgtgaagaatgcggcaaagcctataagtggccctcaacccttagttatcataagaaaattcatactggagagaaaccctacaaatgtgaagaatgtggcaaaggttttagtatgttctcaatccttactaaacatgaggtcattcatactggagagaaaccctacaaatgtgaagaatgtggcaaagctttcaactggtcctcaaaccttatggaacataagaaaattcacactggagagacaccctacaaatgtgaagaatgtggcaaaggctttagtatgttctcaatccttactaaacataaggtaattcataatggagagaaaccctacaaatgtgaagaatgtgataaggcaactcatgctggagagaaaccctacaaatgtgaagaatgtggcaaagctttcaactggtcctcaaaccttatggaacataagagaattcatactggagagaaaccctacaaatgtgaagaatgtggcaaaagcttcagtacattctcaatccttactaaacataaggtaattcatactggagagaaaccctacaaatgtgaagaatgtggcaaagcctataagtggtcctcaacccttagttatcataagaaaattcatactgtagagaaaccctacaaatgtgaagaatgtggcaaagcttttaaccaatctgcaattcttattaaacataagagaattcatactggtgagaaaccctacaaatgtgaagaatgtggcaaaacctttagtaaggtctcaacccttactacacataaggcaattcatgctggagagaagccctacaaatgtaaagaatgtggcaaaacctttattaaggtctcaacccttactacacataaggcaattcatgctggagagaagccctacaaatgtaaagaatgtggcaaagcctttagtaagttctcaatccttactaaacataaggtaattcatactggagagaaaccctacaaatgtgaagaatgtggcaaagctttcaactggtcctcaaaccttatggaacataagagaattcatactggagagaaaccctacaaatgtgaagaatgtggcaaaagctttagtacattctcagtccttactaaacataaggtaattcatactggagagaaaccctacaaatgtgaagaatgtggcaaagcctataagtggtcctcaacccttagttatcataagaaaattcatactgtagagaaaccctacaaatgtgaagaatgtggcaaagcttttaaccgatctgcaatccttattaaacataagagaattcatactgatgagaaaccctacaaatgtgaagaatgtggcaaaacctttagtaaggtctcaacccttactacacataaggcaattcatgctggagaaaagccctacaaatgtaaagaatgtggcaaagcctttagtaagttctcaatccttactaaacataaggtaattcatactggagagaaaccctacaaatgtgaagaatgtggcaaagcctataaatggccctcaacccttagttatcataagaaaattcatactggagagaaaccctacaaatgtgaagaatgtggcaaaggttttagtatgttctccatccttactaaacatgaggtaattcatactggagagaaaccctacaaatgtgaagaatgtggcaaagccttcagctggttgtcagtctttagtaaacataagaaaactcatgctggagagaaattctacaaatgtgaagcatgtggcaaagcctataagtcatcctcaacccttagttatcataagaaaattcatactgaagagaaaccttacaaatatgaagaatgtggcaaaggctttagtacattctcaatccttactaaacataaggtaattcatactggagagaaaccctacaaatgtgaagaatgtggcaaagctttcaactggtcatcaaaccttatggaacataagaaaattcacactggagagacaccctacaaatgtgaagaatgtgacaaagccttcagctggccctcaagccttactgaacataaggcaactcatgctggagaaaaaccctacaaatgtgaagaatgtggcaaagccttcagctggccctcaagacttactgaacataaggcaactcatgctggagaggaaccctacaaatgtgaagaatgtggcaaagctttcaactggtcctcaaaccttatggaacataagagaattcatactggagagaaaccctacaaatgtgaagaatgtggcaaaagctttagtacgttctcaatccttactaaacataaggtaattcatactggagagaaaccctacaaatgtgaagaatgtggcaaagcctataagtggtcctcaacccttagttatcataagaaaattcatactgtagagaaaccctacaaatgtgaagaatgtggcaaaggctttgttatgttctcaatccttgcaaaacataaggtaattcatactggagagaaactctacaaatgtgaagaatgtggcaaagcctataagtggccctcaacccttagatatcacaagaaaattcatactggagagaaaccctacaaatgtgaagaatgtggcaaagcctttagtacgttctcaatcctcactaaacataaggtaattcatactggagagaaaccctacaaatgtgaagaatgtggcaaagccttcagctgttatcataagaaaattcatactggagagaaaccctacaaatgtgaagaatgtggtgaggctttcaactggtcctcaaaccttatggaacataagagaattcatactggagagacaccctacaaatgtgaagaatgtggtaaaggctttagtatgttctcaatccttactaaacataaggtaattcatactggagagaaaccatacaaatgcaaagaatgtggcaaagcctataagtggtcctcaaccctcagttatcatagaaaattcatactggagagaaaccctacaaatgtgaagaaagtggcaaagccttcagctggttctcagtctttaaattcatactggaggaaaaaccctacaaatatgaaaaatgtggcaaaactattaattaattctcaacgcttactgaacataagggaatttgtacaggagggaaaccctacaaatctgaagaatgtggcaagccttttagctattcctcaatccttactaaacattcatgtaattcatactggagggaattcctacaattgtgtggaatgttgcaatgcccttaaccagtccttaaggcttactacatataagacaactcatactggagagaaaccatgcatgtgtgaagaatgtgggaaagcctctaatagatcctcaattcttaagagacataagctaattcatacacaagagagactctacaaacctgaaagatgtgacaatgcttttggcaacacctcagacttttctgaatataaaagaaatcgtacagatgagaaatcctag

SEQ ID NO: 45 - DNA, 604 bp, Homo sapiens
  CDS (225)..(596)
cggtacgagcgaaagtgctttggcggtttgtccatccgcagcttcggcttttccagtctggtggcccttccggccacccctttaaccccagctttccctcccccttctttcgatcagagatcggcggagaccctcgaagtgcgcaaacttgacactcaccctgaccggactggggttttaaggggtgtggcaggaggttttggactcgatgagtttccaccgaaatgtcggagaagtcaggccagagcacaaaagcaaaggatgggaaaaagtatgcaacactcagtttatttaatacttacaaggggaaatcattagaaacacagaaaaccacagctcgacatggattacagagtcttggaaaagtcggtatttcacggcgtatgcctccacctgctaacctcccaagtcttaaagcagaaaacaaaggcaatgatcctaatgtaaacattgtacctaaagatggcacagggtgggcatcaaaacaagagcaacatgaagaagaaaaaaacaccagaagtgccaccagcacagccaaaacctgtggttgcagctcccccagaagtagcacctgctcccaaatcatgggccagtaacaagcaag

SEQ ID NO: 46 - DNA, 1418 bp, Homo sapiens
  CDS (108)..(317)
ccactttgtacaagaaagctgggtacgcgtaagcttgggcccctcgagggatactctagagcggccgctcgcgatctagaactagcagagcctggagcatctccactatggcctgggctccactacttctcaccctcctcgctcactgcacaggttcttgggccagttttatgctgactcagccccactctatgtcggagtctccggggaagacggcaaccatttcctgcacccgcagcagtggcaacattgccagctactatgtacagtggtaccagcagcgccccgggcagttcccccattactgtgatctatgacgatgacctaagaccctctggggtccctgatcggttctctggctccatcgacaggtcctccaactctgcctccctcaccatctctagactgatgactgaggacgaggctgactactactgtcagtcttttgatgagtataatcacagagtgttcggcggagggaccaggctgaccgtcctaggtcagcccaaggctgccccctcggtcactctgttcccgccctcctctgaggagcttcaagccaacaaggccacactggtgtgtctcataagtgacttctacccgggagccgtgacagtggcctggaaggcagatagcagccccgtcaaggcgggagtggagaccaccacaccctccaaacaaagcaacaacaagtacgcggccagcagctacctgagcctgacgcctgagcagtggaagtcccacagaagctacagctgccagaaacctaaccacgcatcacacggcacttctcgcatgccttctgtgtctgctccagtctctgggctaaagagttgctggtccgggacaggggataggtccgctcttggtcagatgccaggtccctgccatggcatccctgaccctatgcaacaagccagtgactctggtcagcccaaggctgccccctcggtcactctgttcccaccctcctctgaggagcttcaagccaacaaggccacactggtgtgtctcataagtgacttctacccgggagccgtgacagtggcctggaaggcagatagcagccccgtcaaggcgggagtggagaccaccacaccctccaaacaaagcaacaacaagtacgcggccagcagctacctgagcctgacgcctgagcagtggaagtcccacaaaagctacagctgccaggtcacgcatgaagggagcaccgtggagaagacagtggcccctacagaatgttcataggttctcatccctcaccccccaccacgggagactagagctgcaggatcccaggggaggggtctctcctcccaccccaaggcatcaagcccttctccctgcactcaataaaccctcaataaatattctcattgtcaatcagagtcgacgcggccgcgaatttagtagtagta

SEQ ID NO: 47 - DNA, 769 bp, Homo sapiens
  CDS (49)..(714)
aattggacccgctctgcaccgcgctgcaggaattcggcacgagccaacatggtgttcaggcgcttcgtggaggttggccgggtggcctatgtctcctttggacctcatgccggaaaattggtcgcgattgtagatgttattgatcagaacagggctttggtcgatggaccttgcactcaagtgaggagacaggccatgcctttcaagtgcatgcagctcactgatttcatcctcaagtttccgcacagtgcccaccagaagtatgtccgacaagcctggcagaaggcagacatcaatacaaaatgggcagccacacgatgggccaagaagattgaagccagagaaaggaaagccaagatgacagattttgatcgttttaaagttatgaaggcaaagaaaatgaggaacagaataatcaagaatgaagttaagaagcttcaaaaggcagctctcctgaaagcttctcccaaaaaagcacctggtactaagggtactgctgctgctgctgctgctgctgctgctgctgctgctgctgctgctgctaaagttccagcaaaaaagatcaccgccgcgagtaaaaaggctccagcccagaaggttcctgcccagaaagccacaggccagaaagcagcgcctgctccaaaagctcagaagggtcaaaaagctccagcccagaaagcacctgctccaaaggcatctggcaagaaagcataagtggcaatcataaaaagtaataaaggttctttttgacctgttgaaaaaaaaaaaa

SEQ ID NO: 48 - DNA, 1528 bp, Homo sapiens
  CDS (62)..(1528)
agaaaaaattgacccgcgctgcaggaaatcgacacgcgctgcaggaattcggcacgagcggatgccgaaggtgaaggcgctgcagtgcgccctggcgctggagatcagctcagtaacttgcccaggagtcgtgcttaaagacaaagaggacatctatcttagcatctgtgtgtttggccaatacaaaaagacacaatgtgtcccagccacttttcccctggtcttcaatgccagaatggtgtttgaaaaggtgttcccggacgcagtagatcctggagatgtggttacacagcttgaatatgatacagcagtgttcgagttgatacagctagttccaccagtgggtgaaacactgtctacgtatgacgaaaatacacgagatttcatgtttccgggtccaaaccaaatgtctggacaccatgattcaaaccgccaggttaccatgaggaggatttctggccttcgaggaaatgctccaaggctggaattttctacgacttcagtgattactgaatgtctgataagttcaaggaaatgccacactcaggataaatttatttaccatttggctccagttgaaaaatcacatggcagactgcaaaacagaacatcaagatcacaaaagaaaaaatccaagtcacctgagagaagtaaatactgtataaatgcaaaaaactacgaacagcctacaatttcttcaaaatcacactctccatctccctacacaaaaagacgcatgtgtgagctatctgaagacaccaggcggcggctggcccatttaaatctgggaccctatgagttcaaaaaagaaacagataaacctccatttgtgattagacatgttgatcccccaagtcccagggctgatactttattgggatcttctggaagagactgtgaaagagatggatggtcaagggtgcacaatgatcattctcatcttggctgctgccgacccaaggattataaggttatcaggacaccccatgggagagacttcgatgactctttagaaaaatgtgaagagtatttgagcccaaggtcgtgtagtaagccccggcattcagcgaggaccttgctagtccattcagcaccctcaacaatgccaaagcattctccaagccctgtgttaaatagagcttctctcagggaaagatttcattctgattggtgttcaccttcaaactgcgatgagatccatgaccgggtaaaaaatgtcttgaaatcacatcaggctcatcaaagacatttatatgatgagagagacctagagaaagatgatgaactggaactgaaaagaagtcttttatgtagagactctgcctatgacagtgaccccgagtatagctcatgtcagcagccacgtggcactttccatttggatgacggtgaatactggtccaacagggcagcctcttataagggaaaatcccaccgacccatctttgagaacagcatggacaagatgtacaggaacttatacaaaaaggcctgtagttctgcttcacatacacaggaaagcttctga

SEQ ID NO: 49 - DNA, 2482 bp, Homo sapiens
  CDS (571)..(2019)
atggttcctccaaagctgcaggaggcctttgaacctttcgatttgaaacatgctggtgcacacttcagagctccgcccagagaatccctcgaccaccgggagaaccgagtctttcggggatttgcccctccagacaagagaaatgagcaagcagggagctcatcagctgttgttagtgtattttacgtgtgtggtatggcccaatacagttcgtcttcttccagtgtggctcagggaagccgaaaggttgaaaatgtccgcttggtagatcgagtgtctcctaaaaaagcagctctaggtactttgtatttgacggctacccatgtcatattcgtggaaaattcacctgacgcaagaaaagaaacatggattcttcacagtcagatttccaccattgagaaacaggcaacaaccgctaccggatgccctctgctgattcgctgcaagaactttcagataatacagctcatcatacctcaggaaagagattgccacgacgtgtacatctccctgatacgccttgcaaggccagtgaaatatgaggagttatactgcttttcattcaaccccatgctggataaagaagaaagagagcaaggctgggtgctgatcgatcttagtgaagaatacacgcggatgggcctccctaatcattactggcagctcagcgatgtgaatagagactatagattttctattctgctaacaaagacagtggaggtcagcaagggaggcatcatcacagaagactttataagaggcttggatttcagttgtgggttttcaacccctacaaccccatcttccagagtgataaaggtctgtgactcttatcctactgaactgtacgttcccaaatcggccacggcacacatcatagtggggagttccaaattccggagtagacggcgatttcctgtcctttcttactattataaagataaccacgcctccatctgccggagcagccagcccctgtccggcttcagtgcccggtgcctagaggacgagcagatgctccaggccattaggaaagccaatccaggaagtgacttcgtttatgtcgttgacacccggcctaaacttaatgcaatggcaaatcgtgctgcagggaaaggctatgagaatgaagacaattattccaatatcaagtttcagtttatcgggatagagaacatccatgtcatgaggaacagtctgcagaaaatgctggaagtgtgtgaacttaaatctccctccatgagtgatttcctgtggggtctggagaactctggctggttaaggcacattaaagccataatggatgcaggaatcttcattgcaaaggcagtgtcagaggaaggggcaagtgtgcttgttcactgttctgatggctgggacaggaccgctcaggtgtgctcggtggcaagcctgctgctggaccctcactaccggactctgaagggcttcatggtattaattgaaaaggactggatttcctttggtcataagtttaatcaccgatatggcaatctagatggtgacccaaaagaaatctctccagttattgaccagttcattgagtgtgtttggcagttaatggaacaatttccctgtgcctttgagttcaatgagaggtttttgattcacattcaacatcacatttattcctgccagtttggaaacttcctatgtaacagccaaaaggagagacgagaactcaagattcaagaaagaacatactcattatgggctcacctgtggaagaatcgggccgataacctgaatcttctgtttagagctgatcacagccagactcagggaacctttcatctccctacaacaccatgtaacttcatgtacaagttttggagtggaatgtataaccgctttgaaaaggggatgcagccccgacagtcagttacagattacctaatggcagtgaaggaagaaactcagcagctagaggaagaactagaggccctggaagaagtaagacatacttgctttgttaatctattttctgtgcttatttcttgaagagcaaggcttcatgaaagcctcttaagattcagtgcaatacaaatatttcacatttttagtcagtagaacacctgaaacacaaccccatccaggtcaggactcagataaccgaagcccaaacctaggcatttaatgcatttcacacatctggtttgtggctcagttccacaaatttttggttgttccttattttaggtcaacttgtttggttactgttatttgagagtagtaaaattaatttttttctggaaagtgtgaaaaagtaacagaataaaatcaaatatatgtacttgtaaaactctttccccacttttagaaattatgttaactatgatattaatctataattggtaaaggggagactgactgtaaagtcttatcttttggcttctatgaacttccctgtacttggacagggaggttataataaaatgcttttcctaattggaaaaaaaaaaaa

SEQ ID NO: 50 - DNA, 2246 bp, Homo sapiens
  CDS (110)..(1891)
acctgcggtaccgctccggaattcccgggtcgacgatttcgtgcggagcccggcccgagagccgcgtccacgttcctgcctcctgctcccgccgccctggggcgccgccatgacgcccgatctgctcaacttcaagaagggatggatgtcgatcttggacgagcctggagagcctccctccccctcgctcaccaccacctctacttcgcagtggaagaaacattggtttgtgctgacagattcaagtctcaaatattacagagactccactgctgaggaggcagatgagctggatggtgagatcgacctgcgttcctgcacggatgtcactgagtacgcggtgcagcgcaactatggcttccagatccacaccaaggatgctgtctataccttgtcggccatgacctcaggcatccggcggaactggatcgaggctctgagaaagaccgtacgtccaacttcagccccagatgtcaccaagctctcggactctaacaaggagaacgcgctgcacagctacagcacccagaagggccccctgaaggcaggggagcagcgggcgggctctgaggtcatcagccggggtggccctcggaaggcggacgggcagcgtcaggccttggactacgtggagctctcgccgctgacccaggcttccccgcagcgggcccgcaccccagcccgcactcctgaccgcctggccaagcaggaggagctggagcgggacctggcccagcgctccgaggagcggcgcaagtggtttgaggccacagacagcaggaccccagaggtgcctgctggtgaggggccgcgccggggcctgggtgcccccctgactgaggaccagcaaaaccggcttagtgaggagatcgagaagaagtggcaggagctggagaagctgcccctgcgggagaataagcgggtgcccctcactgccctgctcaaccaaagccgcggagagcgccgagggcccccaagtgacggccacgaggcactggagaaggaggttcaggctcttcgggcccagctggaggcgtggcgtctccaaggggaggctcctcagagtgcactgagatcccaggaggatggccacatccccccgggctacatctcacaggaggcatgtgagcgcagcctggcagagatggagtcctcgcaccagcaggtgatggaggagctgcagcggcaccacgagcgggagctgcagcgcctgcagcaggagaaggagtggctcctggctgaggagacggcagccacggcctcagccattgaagccatgaagaaggcctaccaggaagagctgagccgagagctgagcaaaacacggagtctccagcagggcccggatggcctccggaagcagcaccagtcagatgtggaggcactgaagcgagagctgcaggtgctatcggagcagtactcgcagaagtgcctggagattggggcactcatgcggcaggctgaggagcgcgagcacacgctgcgccgctgccagcaggagggccaggagctgctgcgccacaaccaggagctgcatggccgcctgtcagaggagatagaccagctgcgcggcttcattgcctcgcagggcatgggcaatggctgcgggcgcagcaacgagcggagttcctgcgagctagaggtgctgcttcgcgtaaaagaaaacgaactccagtacctaaagaaggaggtgcagtgcctccgggacgagctccagatgatgcagaaggacaagcgcttcacctcgggaaagtaccaggacgtctatgtggagctgagccacatcaagacacggtctgagcgggagatcgagcagctgaaggagcacctgcgtcttgccatggccgccctccaggagaaggagtcgatgcgcaacagcctggctgagtagaggtcccgcccagctgcagaccctccaggctggaggaccagccgccctccttccctcctggatggaagtaaaaagccaagctttctccccaccctctgtgggccacacgtgcacttgcacccaccacacacacacacacacacacacacacacacacagacacacagacacatacgcacacacgtgcacacatgtacacacggatacacacacacacacacacactgcatatctgagcgcgcccctcgcactgggtctcaccttgcaccttcttcaggattttatatgtgaagagatttttatatagatttttttcctttttttccaaaacactttatactttaaaaaaaaaaaa

SEQ ID NO: 51 - DNA, 3759 bp, Homo sapiens
  CDS (199)..(2475)
ggcacgagcggcacgatccaccgacgacctcactcagctgcgttacgcgccgctccggctgccggccgcgcgccttgcccgccggctcccgcccgcaatcggcggctcagggcggacccgggtctctgcgttctcgcgagaagcgcggcgctgcggggccgtgggcgcctgagcccgcgcggccctcgagggccgaatatggggggatgcacggtgaagcctcagctgctgctcctggcgctcgtcctccacccctggaatccctgtctgggtgcggactcggagaagccctcgagcatccccacagataaattattagtcataactgtagcaacaaaagaaagtgatggattccatcgatttatgcagtcagccaaatatttcaattatactgtgaaggtccttggtcaaggagaagaatggagaggtggtgatggaattaatagtattggagggggccagaaagtgagattaatgaaagaagtcatggaacactatgctgatcaagatgatctggttgtcatgtttactgaatgctttgatgtcatatttgctggtggtccagaagaagttctaaaaaaattccaaaaggcaaaccacaaagtggtctttgcagcagatggaattttgtggccagataaaagactagcagacaagtatcctgttgtgcacattgggaaacgctatctgaattcaggaggatttattggctatgctccatatgtcaaccgtatagttcaacaatggaatctccaggataatgatgatgatcagctcttttacactaaagtttacattgatccactgaaaagggaagctattaacatcacattggatcacaaatgcaaaattttccagaccttaaatggagctgtagatgaagttgttttaaaatttgaaaatggcaaagccagagctaagaatacattttatgaaacattaccagtggcaattaatggaaatggacccaccaagattctcctgaattattttggaaactatgtacccaattcatggacacaggataatggctgcactctttgtgaattcgatacagtcgacttgtctgcagtagatgtccatccaaacgtatcaataggtgtttttattgagcaaccaaccccttttctacctcggtttctggacatattgttgacactggattacccaaaagaagcacttaaactttttattcataacaaagaagtttatcatgaaaaggacatcaaggtattttttgataaagctaagcatgaaatcaaaactataaaaatagtaggaccagaagaaaatctaagtcaagcggaagccagaaacatgggaatggacttttgccgtcaggatgaaaagtgtgattattactttagtgtggatgcagatgttgttttgacaaatccaaggactttaaaaattttgattgaacaaaacagaaagatcattgctcctcttgtaactcgtcatggaaagctgtggtccaatttctggggagcattgagtcctgatggatactatgcacgatctgaagattatgtggatattgttcaagggaatagagtaggagtatggaatgtcccatatatggctaatgtgtacttaattaaaggaaagacactccgatcagagatgaatgaaaggaactattttgttcgtgataaactggatcctgatatggctctttgccgaaatgctagagaaatgactttacaaagggaaaaagactcccctactccggaaacattccaaatgctcagccccccaaagggtgtatttatgtacatttctaatagacatgaatttggaaggctattatccactgctaattacaatacttcccattataacaatgacctctggcagatttttgaaaatcctgtggactggaaggaaaagtatataaaccgtgattattcaaagattttcactgaaaatatagttgaacagccctgtccagatgtcttttggttccccatattttctgaaaaagcctgtgatgaattggtagaagaaatggaacattacggcaaatggtctgggggaaaacatcatgatagccgtatatctggtggttatgaaaatgtcccaactgatgatatccacatgaagcaagttgatctggagaatgtatggcttcattttatccgggagttcattgcaccagttacactgaaggtctttgcaggctattatacgaagggatttgcactactgaattttgtagtaaaatactcccctgaacgacagcgttctcttcgtcctcatcatgatgcttctacatttaccataaacattgcacttaataacgtgggagaagactttcagggaggtggttgcaaatttctaaggtacaattgctctattgagtcaccacgaaaaggctggagcttcatgcatcctgggagactcacacatttgcatgaaggacttcctgttaaaaatggaacaagatacattgcagtgtcatttatagatccctaagttatttacttttcattgaattgaaatttattttgggtgaatgactggcatgaacacgtctttgaagttgtggctgagaagatgagaggaatatttaaataacatcaacagaacaacttcactttgggccaaacatttgaaaaactttttataaaaaattgtttgatatttcttaatgtctgctctgagccttaaaacacagattgaagaagaaaagaaagaaaaaacttaaatatttatttctatgctttgttgcctctgagaataatgacaatttatgaatttgtgtttcaaattgataaaatatttaggtacaaataacaagactaataatattttcttatttttaaaaagcatgggaagatttttatttatcaaaatatagaggaaatgtagacaaaatggatataaatgaaaattaccatgttgtaaaaccttgaaaatcagattctaactggatttgtatgcaactaagtatttttctgaacacctatgcaggtcttatttacagtagttactaagggaacacacaaagaattacacaacgttttcctcaagaaaatggtacaaaacacaaccgaggagcgtatacagttgaaaacatttttgttttgattggaaggcagattattttatattagtattaaaaatcaaaccctatgtttctttcagatgaatcttccaaagtggattatattaagcaggtattagatttaggaaaacctttccatttcttaaagtattatcaagtgtcaagatcagcaagtgtccttaagtcaaacaggttttttttgttgttgtttttgctttgtttccttttttagaaagttctagaaaataggaaaacgaaaaatttcattgagatgagtagtgcatttaattattttttaaaaaactttttaagtacttgaattttatatcaggaaaacaaagttgttgagccttgcttcttccgttttgccctttgtctcgctccttattctttttttggggggagggttatttgcttttttatcttcctggcataatttccattttattcttctgagtgtctatgttaacttccctctatcccgcttataaaaaaattctccaacaaaaatacttgttgacttgatgttttatcacttctctaagtaaggttgaaatatccttattgtagctactgtttttaatgtaaaggttaaacttgaaaagaaattcttaatcacggtgccaaaattcattttctaacaccatgtgttagaaaattataaaaaataaaataattttagaaaaaaaaaa

SEQ ID NO: 52 - DNA, 2218 bp, Homo sapiens
  CDS (595)..(2070)
taagcttgcggccgcagcgaggggccggagatagcctagttgaaaggcccgggcgtctcggcggggagcgcgttccgcgctgtagggtaatcgcgccgggcggccggccggctggccgggcctcagcgggagccaccgggggctgcgggcggccgtgggacctgcggagacctcctcggggcgcagggaacacgctacagccttcgccgcggcgggcttgtggggagcggcgtcccagcctttcccgggaggctcagccaggtgcctggagcgggagagtcggactcagattcctgctttacctagaatagcaacgtgccctgttcccgttgtaccctcttaaatactatacttcttaaacggcctgtctcccgggaaatttggatatgtgcagtgcatctcctcgaagatgctgatggtggaaatttcttgaaaccgctctcgtaatttgccacgtgctgttgcaaatattctggtgaatgaacacagaatcagcatggctttcctttgctgagaaatcactgatgggaagtgagacttgttaaacttgaaagtgaatggacctgagtggaccctttgatcacatcagtaaacatgagcggtaccaaacctgatattttatgggcaccacaccatgttgatagatttgttgtgtgtgactcagaactaagtctttatcatgtggaatctactgtgaattcagaactcaaagctggatctttacgtttatctgaagactctgcagctacattactgtcaataaattcagatacaccctatatgaaatgtgttgcctggtatcttaattatgatcctgaatgtctgctggcagttggacaagcaaatggtcgagttgtacttacaagccttggtcaagatcataactcaaagttcaaagatttgataggaaaagagtttgttccaaaacatgcacgacaatgtaatacccttgcctggaatccactggatagtaactggctagctgctggtttagataagcacagagctgacttttcagtgctaatatgggatatctgcagcaaatatactcctgatatagttcccatggaaaaagtgaaactttcagcaggtgaaactgaaacaacattattagtaacaaaaccactttatgagttaggacagaatgatgcttgtctgtctctttgttggcttccacgagaccagaaacttctccttgctggtatgcatcgtaacctagctatatttgatcttcggaatacaagccaaaagatgttcgtaaatacaaaagctgttcagggtgtgacggtagacccatatttccacgatcgtgttgcttccttctatgaaggtcaggttgcaatatgggatcttagaaaatttgagaagccagttttgacattgactgagcaaccaaaacccttaacaaaagtagcatggtgtcccactaggactggtctacttgccactttaacaagggatagtaatattattagattgtatgatatgcagcatacacccactcccattggggatgaaactgaacccacaataattgaaagaagtgtgcaaccttgtgacaattacattgcttcctttgcgtggcatccaacaagtcaaaatcgaatgatagttgtaactcccaaccgaacaatgtcagacttcactgtttttgaaaggatatctcttgcctggagcccaattacatctttaatgtgggcttgtggtcgtcatttatatgaatgtacggaagaagaaaatgataattctttagaaaaagatatagcaacgaagatgcgtcttcgggctttatcaaggtatggacttgatacagagcaggtgtggaggaaccacattttagctggaggaaccaaatcagatgaaaaagtggacttgagcaaggacaaaaaattagcccaatttaacaactggtttacatggtgtcataattgcaggcacggtggacatgctggacatatgcttagttggttcagggaccatgcagagtgccctgtgtctgcatgcacgtgtaaatgtatgcagttggatacaacggggaatctggtacctgcagagactgtccagccataaaatgttaccaccttaagagaacccttcaagtgtggagctttctagtaggtgtccttcatagctcagaaacatacctcagaacaagccattcatgacttacctgtaatgggaaaatacatcattctatcagatcagcaaaaaaaaaaaa

SEQ ID NO: 53 - DNA, 1361 bp, Homo sapiens
  CDS (307)..(978)
tttgaaatccatatcacttgactacgccaagcttggcacgagggcgatggcggagtcgctgcccctggagatgctcacatatattctgagcttcctgcctctgtcagatcagaaagaggcctccctcgtgagttgggcttggtaccgtgctgcccagaatgcccttcgggagcaaccaggccttacctccctggacctcagtggctgctcagaactgactgatggggcgctcttggccgtgagccggggcctgcggcacctgcggcgcctgagcctggggaagctgcagcggctgacagatgcaggatgtacagctctgggtggcctgcaggagctgcagagcctcgacatggccgagggcgggaactggcccaggccctgggctgtatgcacggggctccatcccagctggcctccctcagcctggcccactgctcttcattgaagtcacgcccagagctggagcatcaggcctcaggtaccaaggacgcctgtccagagccacagggcccctccctgctcacgctgcgggccctgcaggagttggacctcacagcctgcagcaagctgactgatgccagtttagccaaggtgctccagtttctccagctgaggcagctgtcccttagcctgttgccagaactcacagacaacggcttggttgctgtggccaggggctgtcctagcctggagcacttggcgctgagtcactgcagccgactcagtgacaagggctgggcccaggcagccagctcctggccaaggctgcagcatctcaacctgtccagctgcagtcagctcatagagcagacactggatgctattgggcaggcgtgcaggcagctccgggtgttggatgtggccacgtgccctggcatcaacatggccgccgtcagacgcttccaagcccagctgccccaggtgtcctgtgtccagtcccgcttcgtgggaggggctgacctgaccctaacactctgaggccagaccctctaggactgggggtggggccaatccagggcagcccagagggaacatcctgccacaccgcctggcagtagcctctttccagctacacgtcgctgccacaggcccctggaaatgctacctacgtgttgccgccacaggctcctgctctctggccaagccctgggtgggaggccaggcccccagcgggcagggtctggtgctgggaggagcagagcctctgcctcttgcctgccctcctctcagacctaaggccgggctccacctactcctgtgggactctcccagcaccctgtgtgcactgagcttcagcagctgagcctaggtctgtgctgtaaatcctaagattaaacattccagatagtaaaaaaaaaaaa

SEQ ID NO: 54 - DNA, 742 bp, Homo sapiens
  CDS (115)..(570)
ggcccatttagtgacacatagaacaagttggacaaaaaagcaggtgggtacggtccggattcccgggtcgacccacgcgtccgggaaaaggtcccggagagctgagcagtcaagatgtgtgacttcaccgaagaccagaccgcagagttcaaggaggccttccagctgtttgaccgaacaggtgatggcaagatcctgtacagccagtgtggggatgtgatgagggccctgggccagaaccctaccaacgccgaggtgctcaaggtcctggggaaccccaagagtgatgagatgaatgtgaaggtgctggactttgagcactttctgcccatgctgcagacagtggccaagaacaaggaccagggcacctatgaggattatgtcgaaggacttcgggtgtttgacaaggaaggaaatggcaccgtcatgggtgctgaaatccggcatgttcttgtcacactgggtgagaagatgacagaggaagaagtagagatgctggtggcagggcatgaggacagcaatggttgtatcaactatgaagagctcgtccgcatggtgctgaatggctgaggaccttcccagtctccccagagtccgtgcctttccctgtgtgaattttgtatctagcctaaagtttccctaggctttcttgtctcagcaactttcccatcttgtctctcttggatgatgtttgccgtcagcattcaccaaataaacttgctctctgggcaaaaaaaaaaaa

SEQ ID NO: 55 - DNA, 2148 bp, Homo sapiens
  CDS (1156)..(1839)
gcagtgaaaatgttattagttttgagggggtttgggaagcccagcggtacctgaggagtttctggacatttaagccggctcctaggtgtggccttaacagggaggctgcccttcctttcactgaatgagctgcgtcactcataagctcactgagggaaccccatctgccagctcgtgcgtgctcagacgacgtccatgtctcaagcgttctgtgaaggctgcggtgcagcgtgaggtcaccctgctgtgttcagagctttgctcactgcctgcggggctggaccgttgcacctccagggcccccagaaaccgagtttcgggtcagggtcctctgtgtgcattcctgggggtccatgtaccagctgtgacgacgtccaggggttgggctgagaagcagacacccttggggaaactggctctgtccctcccctcccccatcccaggagctgaggtcttggtgaggccacagggccaggtccacgcaaggactgtccgtgtcctgtcctgtggtctctggccccacgtgacacccacacgtgtggtaggcagcctggcctgggttgtggctatggccaggcccccaagctgtccccgatgcccagggctggtgaccacccaggcaggtgggggccccacttggtaacagagtcatagggcagaacccacctgggctgccacagaaggtctggctgcccctgtgcccactgctccccaccatggccaatcagaagagtcaggggctcctggtctttccgggagggacgtggcccagccagctctaggtgttctgagcagctctgggacccagcgattgaggggtcaggctgggggtgtcagagccagggtcctccttaagtacctcccacactacacagacagtggcccttttgtgggcagcaaattcttgagccatgaaaggatgctttgggccccttccctcccaggagggcagcctgtgcagggatggtgctcagcaggtggacagggcctggggcctgtgtcagggtctcaggcctgggagcaccagcagaggagatggcggctcccagcagtgccgcctgaaagtgtcttgggctaaggacccacacccagggctgccctgcagaaacgcccccgcagagcccagtggtctgtgaggttgcaggcagggtgcgaatggaagggcacaggtgcggggctggcacctgcccggtcctgcccacctcccctccgcccagcccgcacctgcgtctccccacagagctgtccgtggcacagtgcacgcagcggcccgtggacatcgtcttcctgctggacggctccgagcggctgggtgagcagaacttccacaaggcccggcgcttcgtggagcaggtggcgcggcggctgacgctggcccggagggacgacgaccctctcaacgcacgcgtggcgctgctgcagtttggtggccccggcgagcagcaggtggccttcccgctgagccacaacctcacggccatccacgaggcgctggagaccacacaatacctgaactccttctcgcacgtgggcgcaggcgtggtgcacgccatcaatgccatcgtgcgcagcccgcgtggcggggcccggaggcacgcagagctgtccttcgtgttcctcacggacggcgtcacgggcaacgacagtctgcacgagtcggcgcactccatgcgcaagcagaacgtggtacccaccgtgctggccttgggcagcgacgtggacatggacgtgctcaccacgctcagcctgggtgaccgcgccgccgtgttccacgagaaggactatgacagcctggcgcaacccggcttcttcgaccgcttcatccgctggatctgctagcgccgccgcccgggccccgcagtcgagggtcgtgagcccaccccgtccatggtgctaagcgggcccgggtcccacacggccagcaccgctgctcactcggacgacgccctgggcctgcacctctccagctcctcccacggggtccccgtagccccggcccccgcccagccccaggtctccccaggccctccgcaggctgcccggcctccctccccctgcagccatcccaaggctcctgacctacctggcccctgagctctggagcaagccctgacccaataaaggctttgaacccataaaaaaaaaaaa

SEQ ID NO: 56 - DNA, 669 bp, Homo sapiens
  CDS (72)..(626)
aaggatccttaattaaattaatcccccccccccccgctctttccctaagcagcctgaggtgatctgtgaaaatggttcgctattcacttgacccggagaaccccacgaaatcatgcaaatcaagaggttccaatcttcgtgttcactttaagaacactcgtgaaactgctcaggccatcaagggtatgcatatacgaaaagccacgaagtatctgaaagatgtcactttacagaaacagtgtgtaccattccgacgttacaatggtggagttggcaggtgtgcgcaggccaagcaatggggctggacacaaggtcggtggcccaaaaagagtgctgaatttttgctgcacatgcttaaaaacgcagagagtaatgctgaacttaagggtttagatgtagattctctggtcattgagcatatccaagtgaacaaagcacctaagatgcgccgccggacctacagagctcatggtcggattaacccatacatgagctctccctgccacattgagatgatccttacggaaaaggaacagattgttcctaaaccagaagaggaggttgcccagaagaaaaagatatcccagaagaaactgaagaaacaaaaacttatggcacgggagtaaattcagcattaaaataaatgtaattaaaaggaaaaaaaaaaaa

SEQ ID NO: 57 - DNA, 2269 bp, Homo sapiens
  CDS (487)..(1617)
atggggcctggccaggctattcgcctggaagctcggcgaattctcaggatggcggctggggctccaggcggctgcggcagctctggagctaaatattacatttccactcctggatttaagatagggctgcttactgactggctagaagaggcaaaagaaggcacagtaaagggaaatattttcatcttcagatttaaggattcctcgagaaaggaatcaaattcagaaaatgcagacctcagacctgcatccccatcatcacccccttcagagctagaagcgaggaactgctttcgtctggggatcaggagcatcggattgctgtttcccacaacagaacccggaagcaaacatccccggtgcccaaggatcaggaaggtgtgggaggcagttcaggctgccagggagcactcgctgtatctaaaccaaccagcccccaaccagagcgacaaggacaagaagaaggggggctccaaggagaaggccatgaattacgaatttgagcgagagattggttttatcaatagccagccgtcgctcgctgagtgcctgacatcttttccccctgtcgctgatacatttcaaagttcatcaatcaagacctcgacgctttcacactcgacactaattcctcctccttttgagcagaccattcccagcctgaaccccggcagtcaccctcgccacggcgctggcggccgccccaagccgagccccgcgggcagccgcggcagcccggtgcccgccggcgccctgcagccgcccgagtacccctggatgaaggagaagaaggcggccaagaaaaccgcacttctgccggccgccgccgccgccgccaccgccgcagccaccggccctgcttgcctcagccacaaagaatccctggaaatcgccgatggcagcggcgggggatcgcggcgcctgagaactgcttacaccaacacacagcttctagagctggaaaaagaatttcatttcaacaagtacctttgcagaccccgaagggtggagattgcagcgctgctggatttgactgagagacaagtgaaagtgtggtttcagaaccggaggatgaagcacaagaggcagacccagtgcaaggaaaaccaaaacagcgaagggaaatgtaaaagccttgaggactccgagaaagtagaggaggacgaggaagagaagacgctctttgagcaagcccttagcgtctctggggcccttctggagagggaaggctacacttttcagcaaaatgccctctctcagcagcaggctcccaatggacacaatggcgactcccaaagtttcccagtctcgcctttaaccagcaatgagaaaaatctgaaacattttcagcaccagtcacccactgttcccaactgcttgtcaacaatgggccagaactgtggagctggcctaaacaatgacagtcctgaggcccttgaggtcccctctttgcaggactttagcgttttctccacagattcctgcctgcagctttcagatgcagtttcacccagtttgccaggttccctcgacagtcccgtagatatttcagctgacagcttagacttttttacagacacactcaccacaatcgacttgcagcatctgaattactaaaaacattaaagcaaaacaaagcatcaccaaacaaaaactcctttgaccaggtggttttgccttcttttatttgggagtttattttttattttcttcttgacctaccccttccctcctttaagtgttgaggattttctgtttagtgattccctgacccagtttcaaacagagccatcttttacagattattttggagttttagttgttttaaacctaactcaacaaccctttatgtgattcctgagagcagtatgaggcctgcaagaaagtgatcatataattgtatcttcactttctttttatttttgtattacattgggatgcattgtcatgcatattttttgtagaataaattctcctttgctataagtagcttatttttctccccctcttttttcaaggctcataacgggttctttttcttcttttagtctaacttcgtaaataaaattcgtcacaatttatcttcttttttcaattttaatacatttattaaggcggcatgttcaaagtcttcaatggacagcaacaaaacagaaagccaaaaaatgactagggcttctaataagtgttttttctttctttttcgcttcttcttctcctctttctttttaaaggatttgagaggagaagaagaaccaaaaaaaaaaaa

SEQ ID NO: 58 - DNA, 731 bp, Homo sapiens
  CDS (142)..(585)
gcaaggtggggccccaccgggccatgtcttccacagacacatatgtgtgcaaaatgatgcagcagaacagggggactcctgcagtgctgcttagaactactcaaatccagcaacacactcttacaccagagatggaataagatggcaccttataccagagatggaaactgccccagctatgtcaaaagaaggtgggggaaaagagcaacacttgcaaaactgttgacatgtgcatctgcttgtttctgtggagagtatctgcagcataccaggggacagaaaactcaggctgcctccagggaggggaagtgggtgctggagcccagagtgagcatacagtttctggacgtggattccactgcatcttttgtctattctggagacagggtctcactctgtcacccaggctggagtaaagtgattcaatcacagctcaggaagcatcgaactctggggctcaagcaatcctcctgtctcagcctcccaaacagctgggactacaagcatgaatcactatgcctggccaacctactctatcttttgagtttcatacttcatccctggataacccggtcaataaaataaaatagtgagtgggttccccaaggaccggccagaccgggaagaaaagtttaataagaacagaacgctaggggagcctgaaggagctcaagcattttctggaataccccacagagtaaccctgccagcctgaaagcaaccgagactta

SEQ ID NO: 59 - DNA, 515 bp, Homo sapiens
  CDS (191)..(457)
cgcgagggtcgcgaagggcacaacacttggcctctcgctggccctgctcgcggatcccgagtagagaacgcaagcacccacgcccgcctgcaagctcccgggcgcccccggcctctcctgctcggcggaacgaggataacccagtagagccggacccagggatattattgataataaggcctctgtaaccatggctagttctgacgtaaaaccaacatcagtaagtcatgccaaaaaatggtcagaagagatagaaaatctgtacagatttcaacaagcaggatatcgggatgaaaccgaatatagacaagtgaaacaagtttctatggtagatcgttggccggagacaggatatgtgaagaaacttcagagaagggacaatacgttctattactacaacaaacagagggaatgtgatgacaaagaagtccacaaagtgaaaatttatgcttactagcctgtcttctttgtattacttgtcaattatattttaagtattcatcaaaaaaaaaaaa

SEQ ID NO: 60 - DNA, 983 bp, Homo sapiens
  CDS (90)..(803)
tttcgtcgcacgtggaacctctcctggtcctgttgacccgggcccctcggaacctccagcttggtccggtctgggactggaagcctgccatggcggcttctgcggcggagacgcgcgtgtttctggaggtgcggggacagctgcagagcgcgcttctgatcctgggagaaccgaaagaaggaggtatgcccatgaatatttccataatgccatcttcactccagatgaaaacccctgaaggctgcacagaaatccagcttccagcagaggtcaggcttgtaccttcctcttgccgtgggctacagtttgttgttggagatggactgcacctgcgactgcagacgcaagcaaaattaggcacaaaactgatttcaatgtttaatcaaagctcgcaaacccaagaatgttgcacgttttattgccaatcctgcggtgaagtcataataaaagacaggaagctcctcagggtgctcccactgccgagtgagaactggggagctctagttggagaatggtgttgtcatcctgacccctttgctaataaatcacttcatccgcaagagaatgactgttttattggagactctttcttcttggtgaatttaagaaccagtttgtggcagcaaagacctgaactatccccagtggagatgtgctgtgtttcttctgacaaccattgtaaattggaaccaaaggcaaataccaaagtaatttgtaagcgttgcaaggtaatgttgggagagaccgtgtcatcaggtaagaatttcataacaagaagccaaaatgattggcttcttgcttaaaagccagaatgatattttatagtaaatatataggaaagatagatgattaatatatgttgtggaattggtgcttttcaaaatagaccccaagtaacataccatccaatataccaagaagtttgtatattttgaccttcataaaaacagaccattgaattttaagtaaaaagaaaaaaaaaa

SEQ ID NO: 61 - DNA, 1267 bp, Homo sapiens
  CDS (726)..(1229)
cccctcgtgccctctctcaggatgcaaactgatcccctacgaagacaaggctacccacttcgcgtcagtctgcagtccctgcgcgcatgcgctttgctcaggttgcccccgccatatgctaatcactgcgctctggagtaaggcccctccggggaatatgcaaatcactccttccagtgcgggaggcctttcattgtcccgcgctaggattatgcaaataagcaggcctcgggcccaggatccagtccgaactagcgccctccacccccagcgcatcccagttttgtaaggcgcgttcctgccccgcacacgcacgcgcgaacccttcagcttcttgttcctttgggccgcgggctgtaccaagtaaacccaggcagcgaggggcaaagcacggcgccccccgcgcgggtctcgtcgacggcccgacgcgcatagcccctcttcccacagcgctacaggactagtccgtctcgccgcgcaagcgccctaggctcttcacgccccctgcgcgctgtcctaccctacttgcgacgcaggcgcagaggctgggcgtgcagccgccgccgcagagccggagcgggggccgccggcgccgcatccctctctacctgccaacatcctgtattagagaacttgtggccggaggtgtggctgtggagagctggccggggagggacgctgctcagctgctgctctgctcctgtctcctgtcccctcccccggtcatgacagagacccgtgagccagctgagactgggggctacgccagcttggaagaagatgatgaagacctttccccaggccccgagcattcctctgattcagaatacactctctcagagccggactccgaagaggaagaagatgaggaggaggaggaagaggagaccactgacgatcctgaatatgatcctggctacaaggtgaagcagcgccttggcgggggccgtggtggcccatcccgccgggccccccgtgcagcccagcccccggcccagccttgccagctctgtggccgctcaccccttggggaggccccaccgggaaccccacgctgcacgggcacttcatgctgcatgcccggggtgaggtgtaggcagagcccccatacggggagcttggcagaaggggtggggtgggaggagggggctgaggaaattggggttgtgacagtggtcatgggggatggggtactgccggtctgtgttgtcttagaagtagatgtgtgatggccagaataaaagccaaaatctgtaaaaaaaaaaaa

SEQ ID NO: 62 - DNA, 3500 bp, Homo sapiens
  CDS (524)..(2869)
atgggttatgctttcatggacaaagagcaggttctcacagcatcgccccctacagcattagaggagccctggggagggagccctgcagatgctccagaaggggaacctgcagatgctccagaaggggaacctgcagatgctccagaatgggaacctgcagatgcttcagaaggggaacctgcagttgctccagaaggggaacctgcagatgctccagaaggggaacctgaagatgcttcagaaggggaacctacagatgctccagaaggggaagccaggggcaggggcagaggcagggacggggcaggaacaagggaaggtggcggcgggcggaggcgaggccgaagcgccggggcccgcgggcagaggccgcaaacgtatccacgcccctcgtgcatcctggagcggggctgatgacgaacacagggcgcgacggacgcacacaccgcccagcgctcgcacgacgggcccctttcctgggcgtctactggcggggcccccgccccggttcccgggcggcacgatgaccgacacccggcggcgggtgaaggtgtacacgctcaacgaggaccggcagtgggacgaccggggcaccgggcatgtgtcgtctggctacgtggagcggctgaagggcatgtccctgcttgtcagggctgagagcgacggttctctacttttagagtcgaaaataaatcctaacactgcataccagaaacaacaggacactctgattgtgtggtctgaagcagaaaattatgacttggcccttagctttcaagaaaaagctggatgtgatgaaatttgggagaaaatatgtcaggttcaaggaaaggacccttccgtggacatcactcaggaccttgtggatgaatctgaagaggagcgttttgatgatatgtcatcgccaggcttagaattgccatcttgtgaattaagtcgccttgaagaaattgcagaacttgtggcatcatctttaccttcacctcttcgtcgtgaaaaacttgcactggcactagaaaatgagggttatattaaaaagctcctggagctttttcatgtgtgtgaagatttggaaaatattgaaggactgcaccacttgtatgaaattatcaaaggcatctttctcttgaatcgaactgctctttttgaagttatgttctctgaagaatgtataatggacgtcattggatgtttagaatatgatcctgctttatcacaaccacgaaaacacagggaatttctaacaaaaacagccaagtttaaagaagtgattcccatatcagatcctgagctgaaacaaaaaattcatcagacatacagagttcagtatatacaagatatggttctaccaactccttcggtctttgaagaaaacatgttatcaacacttcactcttttatctttttcaataaggtagagattgttggcatgttgcaggaagatgaaaaatttctgacagatttgtttgcacaactaacagatgaagcaacagatgaggaaaaaagacaggaattgggcatggatgatacacaggtgcgaagtgctgctactgatatattctcatacttggttgaatataatccatccatggtacgagagtttgtcatgcaggaggcacaacagaatgatgatgatattttgctcatcaacctcattatagaacatatgatttgtgatacagatcctgaacttggaggagcagtccagcttatgggcctgcttcgaactttagttgacccagagaacatgctagccactgccaataaaacagaaaagactgaatttctgggtttcttctacaagcactgtatgcatgttctcactgctcctttactagcaaatacaacagaagacaaacctagtaaagatgattttcagactgcccaactattggcacttgtattggaattgttaacattttgtgtggagcaccatacctaccacataaagaactacattattaataaggatatcctccggagagtgctagttcttatggcctcgaagcatgctttcttggcattatgtgcccttcgttttaaaagaaagattattggattaaaagatgagttttacaaccgctacataatgaaaagttttttgtttgaaccagtagtgaaagcatttctcaacaatggatcccgctacaatctgatgaactctgccataatagagatgtttgaatttattagagtggaagatataaaatcattaactgctcatgtaattgaaaattactggaaagcactggaagatgtagattatgtacagacatttaaaggattaaaactgagatttgaacaacaaagagaaaggcaagataatcccaaacttgacagtatgcgttccattttgaggaatcacagatatcgaagagatgccagaacactagaagatgaagaagagatgtggtttaacacagatgaagatgacatggaagatggagaagctgtagtgtctccatctgacaaaactaaaaatgatgatgatattatggatccaataagtaaattcatggaaaggaagaaattaaaagaaagtgaggaaaaggaagtgcttctgaaaacaaacctttctggacggcagagcccaagtttcaagctttccctgtccagtggaacgaagactaacctcaccagccagtcatctacaacaaatctgcctggttctccgggatcacctggatccccaggatctccaggctctcctggatccgtacctaaaaatacatctcagacggcagctattactacaaagggaggcctcgtgggtctggtagattatcctgatgatgatgaagatgatgatgaggatgaagataaggaagatacgttaccattgtcaaagaaagcaaaatttgattcataataatggcaacggcctaggatcagtacctgttgaaaaaaactggttctccacccctcccccatacaaaatccacaacaaagcgcagtggtctcttgtgaatgactgacacagatcagcctcttacacttgacttctgctcatcaagtgccaattcaatggagcaggaggaggggatatcatatatttaggggaaagacttaagcctttgagctctccagcttggaccacacattgcccttttctcagggaaggaaatggaaacaaaaagccaacagggcaggggttttgtaagtggaactctggattgactggtcagttgctacaatcagaatatgctttcttggaccatgtttgagactcagaagaatgggcctttctgccataattcttcactagtcaagaatgccagcagtttctttgtataaagagacctgcctttaaaatcatacattctgaacattttagtcaagctacaacaggtttggaaaacctctgtgggggaggggcgagtataaagttttcctcttttttaactgttccctttgcccttcaaactgcagatatttttttttttaagtggggacttctccctacttgattaaagattgagtggaattctaaaaaaaaaaaa

SEQ ID NO: 63 - DNA, 1028 bp, Homo sapiens
  CDS (55)..(348)
cgggcgaggagaagaggtgaccccgcgaaagataataaatcatcattgatcaagatgtcttcagcacctgagcctccaacattcaaaaaggaaccacccaaagaaaaagagtttcaaagcccagggctcagaggggtgcgcacaacaaccttatttcgtgctgtgaatccagagctcttcattaaacctaacaaacctgtaatggctttcggattggtaactctttcactttgcgtggcatatattggttatctacatgcaatacaagagaataaaaaggacctctatgaagctattgatagtgaggggcacagttatatgaggcggaaaacatccaaatgggattagtagtgctggttagtgcagatggacctttattaaaggttctgaaatcttcaaatgaaagaccttgtgagtgtacagtatcatgtttcttgttctagaacatgctaatgaagagagaagatagcagttgcaaccagacaactgtcgtaaattttgtcctttcacagctgcagccattatctcattctttttccacagagtgagcgtcataatatttttctttccttacctcttataaaagtgccatgagaatggaagttgtttttgttaattattaaattctgtataataaaagtacccatgctgttaaatttgcatgatgttttaaatattttaagatgaattatgccggtgcagctgtcgtgaaagtttacttgtgttttgctacttgcaaaggaaatgttcatgttctccctggcatagaacctatatttttaaagaaagataaatagaaattttaaggcctgaagtcaatattaaaaatatgagatatgagaaactgagttggctctgacaagtagtttttatagtgtcacaaatggttcatatatttcagtttccattttagctatttttgggacagaattttattttaatggaaaagatccttccactcagctactaaaataaggattaagaatatcccagagtaattggagtttttctttaaaaaaaaaaaaaaa

SEQ ID NO: 64 - DNA, 1003 bp, Homo sapiens
  CDS (140)..(976)
aaggggactcgccgcagatccgctgtacttgcgtccgctacagtatgtcaatcgcttgccccagcacagctgtcattcttctctacagaagagcttctcctcatcaactggggatgattacagttcttcctaaaaaaggatggctgctctttttctaaagaggttaacactacaaactgtaaagtctgaaaatagttgcattagatgttttggtaaacacatcctgcaaaagacagcaccagcacagttgtcccctattgcttctgccccaagactctccttcctaattcatgcaaaagcctttagtaccgctgaagacacccagaatgaaggaaaaaagacaaaaaagaataaaacagcttttagtaacgttggaagaaaaattagtcagcgagttattcacttatttgatgagaagggcaatgatttgggaaacatgcaccgagcaaatgtgattagacttatggatgagcgagacctgcgactggttcaaaggaacaccagcacagaacctgcagagtatcagctcatgacaggattgcagatcctccaggagcggcagaggctgagggagatggagaaggcgaaccccaaaactggaccaaccctgagaaaggaactgattttgtcttcaaatattggacaacatgatttggacacaaagactaaacagattcagcagtggattaagaaaaaacacctagtccagattaccataaagaaaggaaaaaatgtagacgtgtcagaaaatgaaatggaggagatatttcatcaaatactccagactatgcctggaatagctacattctcatctaggccacaagctgttcaaggaggaaaagctttaatgtgtgttcttcgtgctttgagcaaaaatgaggagaaggcatataaagaaactcaagagacccaggaaagagacactttgaacaaagaccatggaaatgataaggaatcaaatgttctgcatcagtaattttaataaagaaaagcatgctctgag

SEQ ID NO: 65 - DNA, 2342 bp, Homo sapiens
  CDS (62)..(1432)
ggtacctcctgccagcacctcttgggtttgctgagaactcacgggctccagctacctggccatgaccaccacatttctgcaaacttcttcctccacctttgggggtggctcaacccgagggggttccctcctggctgggggaggtggctttggtggggggagtctctctgggggaggtggaagccgaagtatctcagcttcttctgctaggtttgtctcttcagggtcaggaggaggatatgggggtggcatgagggtctgtggctttggtggaggggctggtagtgttttcggtggaggctttggagggggcgttggtgggggttttggtggtggctttggtggtggcgatggtggtctcctctctggcaatgagaaaattaccatgcagaacctcaatgaccgcctggcctcctacctggacaaggtacgtgccctggaggaggccaatgctgacctggaggtgaagatccatgactggtaccagaagcagaccccagccagcccagaatgcgactacagccaatacttcaagaccattgaagagctccgggacaagatcatggccaccaccatcgacaactcccgggtcatcctggagatcgacaatgccaggctggctgcggacgacttcaggctcaagtatgagaatgagctggccctgcgccagggcgttgaggctgacatcaacggcttgcgccgagtcctggatgagctgaccctggccaggactgacctggagatgcagatcgagggcctgaatgaggagctagcctacctgaagaagaaccacgaagaggagatgaaggagttcagcagccagctggccggccaggtcaatgtggagatggacgcagcaccgggtgtggacctgacccgtgtgctggcagagatgagggagcagtacgaggccatggcggagaagaaccgccgggatgtcgaggcctggttcttcagcaagactgaggagctgaacaaagaggtggcctccaacacagaaatgatccagaccagcaagacggagatcacagacctgagacgcacgatgcaggagctggagatcgagctgcagtcccagctcagcatgaaagctgggctggagaactcactggccgagacagagtgccgctatgccacgcagctgcagcagatccaggggctcattggtggcctggaggcccagctgagtgagctccgatgcgagatggaggctcagaaccaggagtacaagatgctgcttgacataaagacacggctggagcaggagatcgctacttaccgcagcctgctcgagggccaggatgccaagatggctggcattggcatcagggaagcctcttcaggaggtggtggtagcagcagcaatttccacatcaatgtagaagagtcagtggatggacaggtggtttcttcccacaagagagaaatctaagtgtctattgcaggagaaacgtcccttgccactccccactctcatcaggccaagtggaggactggccagagggcctgcacatgcaaactccagtccctgccttcagagagctgaaaagggtccctcggtcttttatttcagggctttgcatgcgctctattccccctctgcctctccccaccttctttggagcaaggagatgcagatcgagggcctgaatgaggagctagcctacctgaagaagaaccacgaagagtgggtccctcccatcctgcaggagatgaaggagttcagcagccagctggccggccaggtcaatgtggagatggacgcagcaccgggtgtggacctgacccgtgtgctggcagagatgagggagcagtacgaggccatggcggagaagaaccgccgggatgtcgaggcctggttcttcagcaagactgaggagctgaacaaagaggtggcctccaacacagaaatgatccagaccagcaagacggagatcacagacctgagacgcacgatgcaggagctggagatcgagctgcagtcccagctcagcatgaaagctgggctggagaactcactggccgagacagagtgccgctatgccacgcagctgcagcagatccaggggctcattggtggcctggaggcccagctgagtgagctccgatgcgagatggaggctcagaaccaggagtacaagatgctgcttgacataaagacacggctggagcaggagatcgctacttaccgcagcctgctcgagggccaggatgccaagatggctggcattgccatcagggaagcctcttcaggaggtggtggtagcagcagcaatttccacatcaatgtagaagagtcagtggatggacaggtggtttcttcccacaagagagaaatctaa

SEQ ID NO: 66 - DNA, 2662 bp, Homo sapiens
  CDS (75)..(2633)
gcggtccctaattcccgggtcgacgatttcgtagatccacagctaagacgccgggactccctgttttcctataaatggaaccactgacatttaaagatgtcgccatagaattctctctggaggagtggcaatgcctggatactgcacagcgggatttatataggaatgtgttgttagagaactacagaaacctggtctttttgggtattgctgtctctaagccatatctgatcacctgtctggagcaaaaaaaagagccctggaatataaaaagacatgagatggtagccaaacccccagtaatgtcttttcattttgcccaagacctttggccagagcagaacataaaagattctttccagaaagtgacactgagaagatacggaaaatgtgaatatgagaatttacagttaaggaaaggctgtaaacatgtggatgagtgtacggggcacaaaggaggtcataatacagttaaccaatgtttgacagctaccccaagcaaaatattccagtgtaataaatatgtgaaagtctttgataaattttcaaattcaaatagatataagagaagacatacaggaaacaaacacttcaaatgtaaagaatgtagcaaatcattttgcgtgctttcacaactaactcagcatagaagaattcatactagagtgaattcctacaaatgtgaagaatgtggaaaagcctttaactggttctcaactcttactaaacataagagaattcatactggagaaaagccctacaaatgtgaagaatgtggcaaagcctttaaccagtcctcacaacttactaggcataagataattcatactgaagagaaacccaacaaatgtgaagaatgtggcaaggcctttaaacaggcctcacaccttactatacataaaataattcatactggagaaaaaccttacaaatatgaagaatgtggcaaagtctttagccagtcctcacaccttactacacaaaagatacttcacactggagagaacctctacaagtgtaaagaatgtggaaaagcttttaacctattctcaaatcttactaaccataagagaattcatgctggggagaaaccctacaaatgtaaagaatgtggcagagcttttaacatatcctcaaaccttaataaacaggagaaaattcatactggagggaaactcaacaaatgtgaagaatgtgacaaagcttttaaccgatccttaaaacttactgcacataagaaaattctaatggaagagaaaccctacaaatgtgaagaatgtggcaaagtctttaaccagttctcaactcttactagacataagataattcatactggagagaaaccctacaaatgtaaagaatgtggcaaagcttttaaccaatcttcaaaccttactgaacataagaaaattcatactgcagagaaatcctataaatgtgaagaatgtggcaaagcttttaaccaacactcaaacctaattaaccataggaaaatttattctggagagaaaccatacaaatgtgaagaatgtggaaaagcttttaatcgatcctcaacccttactagacataagaaaattcatactggagagaaaccctacaaatgtgaagaatgtgacagagcttttagccagtcttcaaaccttactgaacataagaaaattcatactggagagaaaccctataaatgtgaggaatgtggcaaagcttttaaccgattctcaacccttactaaacataagagaattcatactggagaaaaaccctataaatgtgaagaatgtggaaaagcctttaatcaatcctatcaacttactagacataagatagttcatactaaagagaaactcaacaaatgtgaagaatttggcaaggcctttaaacagtcctcacaccgtactatacataaaattattcatactggagagaaaccctacaaatgtgaagaacatggcaaagtttttaaccagtcctcaaaccttactacacaaaagataattcatactggagagaacctctacaaatttgaagaacatggaaaagcttttaacctattctcaaacattactaaccataagataatttatactggagagaaaccccacaaatgtgaagaatgtggaaaagcttataaccgattctcaaacctaactatacataagagaattcatacgggagagaaaccttaccaatgtgcagaatgtggcaaagcctttaactgctcctcaacccttaatagacataagataattcatactggagagaaaccttacaaatgtaaagaatgtggcaaagcttttaacctatcctcaacccttactgcacataagaaaattcatactggagagaaaccctataaatgtgaagaatgtggcaaagcttttaaccaatcctcaaaccttaccacacataagaaaattcatacttcagagaaaccctacaaatgtgaagaatgtggcaaatcctttaaccagttctcatctcttaatatacataagataattcatactggagagaaaccctacaaatgtggagattatggcagagctttcaacctatcctcaaatcttactacacataagaaaattcatactggagagaaaccctacaaatgtgaatatggcaaaacttaatttgatcctacaggttaattacacttagg

SEQ ID NO: 67 - DNA, 733 bp, Homo sapiens
  CDS (153)..(413)
ccagtgcgtggaattcgaaaggtcatagtcctgtttggcggccatttctcttgaaactgcggctcgggacctgcggtacctgctgtagtcacgagggacgggcggcggcctggtcggcagagagtagcctgcaacattcggccgtggttacgatgagtttacccctcaatcccaaacctttcctcaatggactaacaggaaagccagtgatggtgaaacttaagtggggaatggagtacaagggctatctggtatctgtagatggctacatgaacatgcagcttgcaaatacagaagaatacatagatggagctttgtctggacatctgggtgaagttttaataaggtgtaataatgtcctttatatcagaggtgtggaagaagaggaagaagatggggaaatgagagaatagcatcttttgtgggggattttttttatatatatttctagacaataaagatttgtttgtttttcaacttgaaaaaaaatcccccacaaaagatgctattctctcatttccccatcttcttcctcttcttccacacctctgatataaaggacattattacaccttattaaaacttcacccagatgtccagacaaagctccatctatgtattcttctgtatttgcaagctgcatgttcatgtagccatctacagataccagatagcccttgtactccattccccacttaagtttcaccatcactggctttcctgttagtccatg

SEQ ID NO: 68 - DNA, 899 bp, Homo sapiens
  CDS (11)..(211)
  misc_feature (1)...(899): n = a,t,c or g
gaacaattttatgccaacaaattatacaacttggatgaaatggacaattatttttgagatggagtcttgctctgttgccctggctggaatgcagtggtacaatcacggcttcctccaacctccgcttcccaggctcaagcaatcctgcctcagcctccctagcagctgggactctgctcagcgctccggacgcctgcagtcactatggtaacggccaacgacttccggaagaagaacggcgggcggcgagggtcattcccagccgcaaactgagtgcgctgagcggggaagcgcaaaggggcaagttacccgtcctggcgtttctggggttcgcctcggaggctagcctcggtgctctcgcaggctcgctcgcttctgcatccccgttgccgcccggagccaactcttaagttctggacgccaggcctgaggcagttccgccatggacttctccaagttcctggcagacgacttcgacgtgaaggagtggatcaatgcggccttcagggccggctccaaggaggcggcgtccgggaaggcggatggccacgcagccaccctggtgatgaagctgcagctgttcatccaagaggtgaaccacgccgtggaggaaacaagtcaccaagctctccagaacatgcccaaagtgctccgtgatgttgaagccctaaaacaggaggcatctttcctgaaagaacagatgattcttgtcaaggaggacattaaaaaatttgaacaggacacatctcaatccatgcaggtggtggtagaaattgaccaagtgaaggccagaatgcaacttgctggcgaatctcttcangaggcagataagtggaggacgttgagcgccgatattggggagacatttaagacctcagacatagctgggattctggccg

SEQ ID NO: 69 - DNA, 5468 bp, Homo sapiens
  CDS (610)..(5259)
atggggcagaagctgctgacatgcgctttgggggtaatcccccagcctcagcccagcccaggcctggggcctgggttcagagagcgacgagcttccgaggcagcagccggcctagggctagggctgacagacgggaccaggagctctcgaggtgtctggaggctcagcggcagggacgaagaaggagggcactctctcttgtccctgccccgcctgaacttcctgtgccaggctccgggcatgaccctcacagccacgggcctgggacagagagctgatgacccaggagaccccctctactaccacctacaaggttcaggcttctcgtgtccccagctcaggactctgtgctgtgtatcagtcctggagcgccggacccaggaggcccaaggagctggaggtgaccctcaggcagcaagaaccccacggaagggcgtgagccctgcagacagctgtgcggcacctcgggctgggctcctgttaggaggaagtgcctgcacccaggcagcggctcagaggcagctgctccatgcagaactgaagctggttctgcagcagaaaggggagaggacacaggagcctggggtgcaggtgcctcccagcaacgccatggaggccaggagccggagtgccgagcccgccctccgactgacagccaaagactggataccacgacactcaatcacaactcaagattatctccagaccacaccgacaacagacccatccaccatatacaaccccgatatacatccaataaccacactatcgagaatagacgaacacagagacacggaagaggcaccagaacggaccgcaggagctagaaaaaccagaaccagagagatcctagaaagccagctgccctcaggcttgcttaaaggggagacgccggagtgggagctgaggcgggcggagttggtggaaattatcgtggagacggaggcgcagaccggggtcagcggcatcaacgtagcgggcggcggcaaagagggaatcttcgttcgggagctgcgcgaggactcacccgccgccaggagcctcagcctgcaggaaggggaccagctgctgagtgcccgagtgttcttcgagaacttcaagtacgaggacgcactacgcctgctgcaatgcgccgagccttacaaagtctccttctgcctgaagcgcactgtgcccaccggggacctggctctgcggcccgggaccgtgtctggctacgagatcaagggcccgcgggccaaggtggccaagctgaacatccagagtctgtcccctgtgaagaagaagaagatggtgcctggggctctgggggtccccgctgacctggcccctgttgacgtcgagttctcctttcccaagttctcccgcctgcgtcggggcctcaaagccgaggctgtcaagggtcctgtcccggctgcccctgcccgccggcgcctccagctgcctcggctgcgtgtacgagaagtggccgaagaggctcaggcagcccggctggccgccgccgctcctccccccaggaaagccaaggtggaggctgaggtggctgcaggagctcgtttcacagcccctcaggtggagctggttgggccgcggctgccaggggcggaggtgggtgtcccccaggtctcagcccccaaggctgccccctcagcagaggcagctggtggctttgccctccacctgccaacccttgggctcggagccccggctccgcctgctgtggaggccccagccgtgggaatccaggtcccccaggtggagctgcctgccttgccctcactgcccactctgcccacacttccctgcctagagacccgggaaggggctgtgtcggtagtggtgcccaccctggatgtggcagcaccgactgtgggggtggacctggccttgccgggtgcagaggtggaggcccggggagaggcacctgaggtggccctgaagatgccccgccttagttttccccgatttggggctcgagcaaaggaagttgctgaggccaaggtagccaaggtcagccctgaggccagggtgaaaggtcccagacttcgaatgcccacctttgggctttccctcttggagccccggcccgctgctcctgaagttgtagagagcaagctgaagctgcccaccatcaagatgccctcccttggcatcggagtgtcagggcccgaggtcaaggtgcccaagggacctgaagtgaagctccccaaggctcctgaggtcaagcttccaaaagtgcccgaggcagcccttccagaggttcgactcccagaggtggagctccccaaggtgtcagagatgaaactcccaaaggtgccagagatggctgtgccggaggtgcggcttccagaggtagagctgcccaaagtgtcagagatgaaactcccaaaggtgccagagatggctgtgccggaggtgcggcttccagaggtacagctgctgaaagtgtcggagatgaaactcccaaaggtgccagagatggctgtgccggaggtgcggcttccagaggtacagctgccgaaagtgtcagagatgaaactcccagaggtgtcagaggtggctgtgccagaggtgcggcttccagaggtgcagctgccgaaagtgccagagatgaaagtccctgagatgaagcttccaaaggtgcctgagatgaaacttcctgagatgaaactccctgaagtgcaactcccgaaggtgcccgagatggccgtgcccgatgtgcacctcccagaagtgcagcttccaaaagtcccagagatgaagctccctgagatgaaactccctgaggtgaaactcccgaaggtgcccgagatggctgtgcccgatgtgcacctcccggaagtgcagctcccgaaagtcccagagatgaaactccctaaaatgcctgagatggctgtgccagaggttcgactccccgaggtgcagctgccaaaagtctcagagatgaaactccccaaggtgcctgaaatggccgtgcccgatgtgcacctcccagaggtgcagctgcccaaagtctgtgaaatgaaagtccctgacatgaagctcccagagataaaactccccaaggtgcctgagatggctgtgcccgatgtgcacctccccgaggtgcagctgccgaaagtgtcagagattcggctgccggaaatgcaagtgccgaaggttcccgacgtgcatcttccgaaggcaccagaggtgaagctgcccagggctccggaggtgcagctaaaggccaccaaggcagaacaggcagaagggatggaatttggcttcaagatgcccaagatgaccatgcccaagctagggagggcagagtccccatcacgtggcaagccaggcgaggcgggtgctgaggtctcagggaagctggtaacacttccctgtctgcagccagaggtggatggtgaggctcatgtgggtgtcccctctctcactctgccttcagtggagctagacctgccaggagcacttggcctgcaggggcaggtcccagccgctaaaatgggcaagggagagcgggtggagggccctgaggtggcagcaggggtcagggaagtgggcttccgagtgccctctgttgaaattgtcaccccacagctgcccgccgtggaaattgaggaagggcggctggagatgatagagacaaaagtcaagccctcttccaagttctccttacctaagtttggactctcggggccaaaggtggctaaggcagaggctgagggggctgggcgagctaccaagctgaaggtatccaaatttgccatctcactccccaaggctcgggtgggggctgaggctgaggccaaaggggctggggaggcaggcctgctgcctgccctcgatctgtccatcccacagctcagcctggatgcccacctgccctcaggcaaggtagaggtggcaggggccgacctcaagttcaaggggcccaggtttgctctccccaagtttggggtcagaggccgggacactgaggcagcagaactagtgccaggggtggctgagttggagggcaagggctggggctgggatgggagggtgaagatgcccaagctgaagatgccttcctttgggctggctcgagggaaggaagcagaagttcaaggtgatcgtgccagcccgggggaaaaggctgagtccaccgctgtgcagcttaagatccccgaggtggagctggtcacgctgggcgcccaggaggaagggagggcagagggggctgtggccgtcagtggaatgcagctgtcaggcctgaaggtgtccacagccgggcaggtggtcactgagggccatgacgcggggctgaggatgcctccgctgggcatctccctgccacaggtggagctgaccggctttggggaggcaggtaccccagggcagcaggctcagagtacagtcccttcagcagagggcacagcaggctacagggttcaggtgccccaggtgaccctgtctctgcctggagcccaggttgcaggtggtgagctgctggtgggtgagggtgtctttaagatgcccaccgtgacagtgccccagcttgagctggacgtggggctaagccgagaggcacaggcgggcgaggcggccacaggcgagggtgggctgaggctgaagttgcccacactgggggccagagctagggtggggggcgagggtgctgaggagcagcccccaggggccgagcgtaccttctgcctctcactgcccgacgtggagctctcgccatccgggggcaaccatgccgagtaccaggtggcagagggggagggagaggccggacacaagctcaaggtacggctgccccggtttggcctggtgcgggccaaggagggggccgaggagggtgagaaggccaagagccccaaactcaggctgccccgagtgggcttcagccaaagtgagatggtcactggggaagggtcccccagccccgaggaggaggaggaggaggaggaagagggcagtggggaaggggcctcgggtcgccggggccgggtccgggtccgcttgccacgtgtaggcctggcggccccttctaaagcctctcgggggcaggagggcgatgcagcccccaagtcccccgtcagagagaagtcacccaagttccgcttccccagggtgtccctaagccccaaggcccggagtgggagtggggaccaggaagagggtggattgcgggtgcggctgcccagcgtggggttttcagagacaggggctccaggcccggccaggatggagggggctcaggctgcggctgtctgaagcccctagtcagatggggatcccttcttgccttcctttctctaccccctcgctgttgtgtgtgtgataactagcactaaccctaagagggccgggaggtgggtgactgaccagggctggcagggaggcctgctcctgtctctctggcaggagtgcctgtaccccaccaagccatgtgaataaaataatctggaagtaaaaaaaaaaaa

SEQ ID NO: 70 - DNA, 2958 bp, Homo sapiens
  CDS (242)..(2437)
ggcacgagggcatggcggagaaggatgacaccggagtttgacgaaaaggtggtttttgagaattctccactttaccaatacttacaggatctgggacacacagactttgaaatatgttcttctttgtcaccaaaaacagaaaaatgcacaacagagggacaacaaaagcctcctacaagagtcctaccaaaatacctgggatatagtaatcactcaatgaatataaactgcacttactggcatgctcaaggaatgggctattaagcaaggtatcctgttaaaagtggctgaaaccatcaaaagttggatttttttttctcagtgcaataagaaagatgacttacttcacaagttggatattggattccgactcgactcattacataccatcctgcaacaggaagtcctgttacaagaggatgtggagctgattgagctacttgatcccagtatcctgtctgcagggcaatctcaacaacaggaaaatggacaccttccaacactttgctccctggcaacccctaatatttgggatctctcaatgctatttgccttcattagcttgctcgttatgcttcccacttggtggattgtgtcttcctggctggtatggggagtgattctatttgtgtatctggtcataagagctttgagattatggaggacagccaaactacaagtgaccctaaaaaaatacagcgttcatttggaagatatggccacaaacagccgagcttttactaacctcgtgagaaaagctttacgtctcattcaagaaaccgaagtgatttccagaggatttacactggtcagtgctgcttgcccatttaataaagctggacagcatccaagtcagcatctcatcggtcttcggaaagctgtctaccgaactctaagagccaacttccaagcagcaaggctagctaccctatatatgctgaaaaactaccccctgaactctgagagtgacaatgtaaccaactacatctgtgtggtgccttttaaagagctgggccttggacttagtgaagagcagatttcagaagaggaagcacataactttacagatggcttcagcctgcctgcattgaaggttttgttccaactctgggtggcacagagttcagagttcttcagacggttagccctattactttctacagccaattcacctcctgggcccttacttactccagcacttctgcctcatcgtatcttatctgatgtgactcaaggtctacctcatgctcattctgcctgtttggaagagcttaagcgcagctatgagttctatcggtactttgaaactcagcaccagtcagtaccgcagtgtttatccaaaactcaacagaagtcaagagaactgaataatgttcacacagcagtgcgtagcttgcagctccatctgaaagcattactgaatgaggtaataattcttgaagatgaacttgaaaagcttgtttgtactaaagaaacacaagaactagtgtcagaggcttatcccatcctagaacagaaattaaagttgattcagccccacgttcaagcaagcaacaattgctgggaagaggccatttctcaggtcgacaaactgctacgaagaaatacagataaaaaaggcaagcctgaaatagcatgtgaaaacccacattgtacagtagtacctttgaagcagcctactctacacattgcagacaaagatccaatcccagaggagcaggaattagaagcttatgtagatgatatagatattgatagtgatttcagaaaggatgatttttattacttgtctcaagaagacaaagagagacagaagcgtgagcatgaagaatccaagagggtgctccaagaattaaaatctgtgctgggatttaaagcttcagaggcagaaaggcagaagtggaagcaacttctatttagtgatcatgccgtgttgaaatccttgtctcctgtagacccagtggaacccataagtaattcagaaccatcaatgaattcagatatgggaaaagtcagtaaaaatgatactgaagaggaaagtaataaatccgccacaacagacaatgaaataagtaggactgagtatttatgtgaaaactctctagaaggtaaaaataaagataattcttcaaatgaagtcttcccccaaggagcagaagaaagaatgtgttaccaatgtgagagtgaagatgaaccacaagcagatggaagtggtctgaccactgcccctccaactcccagggactcattacagccctccattaagcagaggctggcacggctacagctgtcaccagattttaccttcactgctggccttgctgcagaagtggctgctagatctctctcctttaccaccatgcaggaacagacttttggtgatgaggaggaagaacaaataatagaagaaaataaaaatgagatagaagaaaagtaagaaccaagattcatatgaagtgatattagattgttccttttacaaaagtgtttagcttcaagactggaaagggaatatgagtgtaagtttactatatataaagctaagatgtggatttacaggaagaaccctggtttgaataactgatctgaaattagtagttacctgtaaatggcagatcttttaggaaaataagagaaaggtaagggctcttttgaataaactgctgttttatttgtggcacaactgatcaatcttggaaattctttaagtatttttaataagaaatgaattatcatttcttgccagaatttgctaccttaaggtgattgggaaaattctgttgcaagaacattaacatttagtatgactcctttttactgtatttcttgcagtttaaataactgcaaagctattatgtttaataaacaagttggtttggtatttttattttttgttttataccagttcttaaacgatccaggtttcttgaataaaaaaattaattttgatcccaaaaa

SEQ ID NO: 71 - DNA, 2685 bp, Homo sapiens
  CDS (1)..(2685)
atggggggtgagctcttcaagccccaggggagaattctgttccgttcctgggacatcccaggtaccgtcaagcacagaaaatacttgtggcatgaatgtgatgagaacacagaattgcagaagccaaagaaagagaagcgtaagggccctccttccacccctacctcccccacccgctgctacacgcaccaggaccacctgctggagcccctcgtgtcctcccttgcagcacgcatgggaagaaaggccatcgtcctcgccattgctaacaccagccttgcgtttcctctttgccagaataggggggtcattgagggaaatttccaaaggaaggtggaacgggatgggtggggaggtaagggcatgagcagaggcagtgatcgtgggcaggaggtgtccatagaagacgggctgccactggccctggagacagaagagcagaggaagcgttactccacagttgttatggctgatgtatcccagtacccagtcaatcacctggtgacgttctgcctgggtgaggacgatggcgtgcataccgtggaggatgcctccaggaagttggccgtcatggatagccagggccgagtctgggcacaggagatgctgctgcgagtgtctcccgaccatgtcacgctgctcgacccggcctccaaggtgccggggggcacgagccgctcgttgctgctgctcgtgtgccaggaacccgagcgcgcgcagcccgacgtgcacttcttccagggcctgcgcctcggggcggagctgatccgagaggacatccagggggctctgcacaattaccgctcgggccgcggggagcgcagggcggcggcgctcagggccacgcaggaggagttgcagcgcgaccgctcgcccgccgctgagaccccgcccctgcagcgccgcccgtcagtccgcgcagtgatcagcaccgtagagcggggcgcgggccgcggacgaccccaggcgaagcccattcccgaggcagaggaggcgcagaggcctgagccggtggggacctcgagcaacgctgactcggcctccccggacctgggtccccggggtcctgacctggcggttctgcaggcggagcgggaagtggacatcctgaaccacgtgttcgacgacgtagagagctttgtatcgaggctgcagaagtcggcggaggcggccagggtgctggagcacgcggaacgcggccgcaggagccggcgccgggcggctggggagggcttgctgacgctgcgggccaagccgccctcggaggccgagtacaccgacgtgctgcagaagatcaagtacgccttcagcctgctggcccggctgcgcggcaacatcgccgacccctcctctctggagctgttgcacttccttttcgggcctctgcagatgattgtgaacacgtcgggggggccggagttcgcgagcagtgtgcggcggccgcatctgacatcggatgccgtggcgctgctgcgggacaacgtcactccacgtgaaaacgagctctggacctcgctgggggactcgtggacccgccccgggctggagctgtccccggaggagggacccccatacagacccgagttcttcagcggctgggagccgccggtcactgacccgcagagccgcgcctgggaggacccagttgagaaacagctacagcacgagcggaggcgccggcagcaaagcgcccccgaggtcgctgtcaatggtcaccgagacttggagccagaatctgagcctcagctggagtcagagacagcaggaaaatgggtcctgtgtaattatgacttccaggcccgcaacagcagtgagctgtcggtcaagcagcgggacgtactggaggtcctggatgacagtcgtaagtggtggaaggttcgggacccagcggggcaggagggatatgtgccctacaacatcctgacaccctaccccggaccccggctgcaccacagccaaagccctgcccgcagcctgaacagcactcctcctccaccaccagccccagccccggccccacctccagctctggctcggccccgctgggacaggccccgctgggacagctgcgatagctcaacggcttggaccccagcgagaagggtgagtgagaaattctcccagatgctcatcgtcaacgaggaactgcaggcgcgcctggcccagggccgctcgggaccgagccgcgcagtcccagggccccgcgccccggaaccgcagctcagcccgggctcggacgcctccgaggtccgcgcctggctgcaggccaagggctttagctccgggaccgtggacgcgctgggtgtgctgaccggggcgcagcttttctcgctgcagagggaggagctgcgggcggtgagccccgaggagggggcacgtgtgtacagccaggtcaccgtgcagcgctcgctgctggagcatcttggatctgctctcctcagcaatcagaagcttgaaactctggacctgggccagaatcatttgtggaagagtggcataattaagctctttggggttctaagacaaagaactggatccttgaagatactcaggttgaagacctatgaaactaatttggaaatcaagaagctgttggaggaagtgaaagaaaagaatcccaagctgactattgattgcaatgcttccggggcaacggcacctccgtgctgtgactttttttgctga

SEQ ID NO: 72 - DNA, 623 bp, Homo sapiens
  CDS (168)..(332)
ctcaccgtgtgtagttggcatctccgcgcgtccggacacccgatcccagcatccctgcctgcaggactgttcgtgttcagctcgcgtcctgcagctgtccgaggtgctccagttggaggctgaggttcccgggctctgtagctgagtgggcggcggcaccggcggagatgcctgggaagaaggcgcgcaagaacgctcaaccgagccccgcgcgggctccagcagagctggaagtcgagtgtgctactcaactcaggagatttggagacaaactgaacttccggcagaaacttctgaatctgatatccaaactcttctgctcaggaacctgactgcatcaaaaacttgcatgaggggactccttcaaaagagttttctcaggaggtgcacgtttcatcaatttgaagaaagactgcattgtaattgagaggaatgtgaaggtgcattcatgggtgcccttggaaacggaagatggaatacatcaaagtgaatttctgttcaagttttcccagattatcattctttgggatgagagaacattataaaaccactttgtttattttaaagcaagaatggaagacccttgaaaataaagaagtaattattgacacaaaaaaaaaaaa

SEQ ID NO: 73 - DNA, 2760 bp, Homo sapiens
  CDS (241)..(1251)
gcaggggaggtggctggtttaaggggaacttgagggaagtagggaagactcctctcgggacctttggagtaggtgacacatgagcccagccccagctcacctgccaatccagctgaggagctcacctgccaatccagctgaggctgggcagaggtgggtgagaagagggaaaattgcagggacctccagttgggccaggccagaagctgctgtagctttaaccagacagctcagacctgtatggaggctgccagtgacaggttaggtttagggcagagaagaagcaagaccatggtggggaagatgtggcctgtgttgtggacactctgtgcagtcagggtgaccgtcgatgccatctctgtggaaactccgcaggacgttcttcgggcttcgcagggaaagagtgtcaccctgccctgcacctaccacacttccacctccagtcgagagggacttattcaatgggataagctcctcctcactcatacggaaagggtggtcatctggccgttttcaaacaaaaactacatccatggtgagctttataagaatcgcgtcagcatatccaacaatgctgagcagtccgatgcctccatcaccattgatcagctgaccatggctgacaacggcacctacgagtgttctgtctcgctgatgtcagacctggagggcaacaccaagtcacgtgtccgcctgttggtcctcgtgccaccctccaaaccagaatgcggcatcgagggagagaccataattgggaacaacatccagctgacctgccaatcaaaggagggctcaccaacccctcagtacagctggaagaggtacaacatcctgaatcaggagcagcccctggcccagccagcctcaggtcagcctgtctccctgaagaatatctccacagacacatcgggttactacatctgtacctccagcaatgaggaggggacgcagttctgcaacatcacggtggccgtcagatctccctccatgaacgtggccctgtatgtgggcatcgcggtgggcgtggttgcagccctcattatcattggcatcatcatctactgctgctgctgccgagggaaggacgacaacactgaagacaaggaggatgcaaggccgaaccgggaagcctatgaggagccaccagagcagctaagagaactttccagagagagggaggaggaggatgactacaggcaagaagagcagaggagcactgggcgtgaatccccggaccacctcgaccagtgacaggccagcagcagagggcggcggaggaagggttaggggttcattctcccgcttcctggcctcccttctcctttctaagccctgttctcctgtccctccatcccagacattgatggggacatttcttccccagtgtcagctgtggggaacatggctggcctggtaagggggtccctgtgctgatcctgctgacctcactgtcctgtgaagtaacccctcctggctgtgacacctggtgcgggcctggccctcactcaagaccaggctgcagcctccacttccctcgtagttggcaggagctcctggaagcacagcgctgagcatggggcgctcccactcagaactctccagggaggcgatgccagccttggggggtgggggctgtcctgctcacctgtgtgcccagcacctggaggggcaccaggtggagggtttgcactccacacatctttcttgaatgaatgaaagaataagtgagtatgcttgggccctgcattggcctggcctccagctcccactccctttccaacctcacttcccgtagctgccagtatgttccaaaccctcctgggaaggccacctcccactcctgctgcacaggccctggggagcttttgcccacacactttccatctctgcctgtcaatatcgtacctgtccctccaggcccatctcaaatcacaaggatttctctaaccctatcctaattgtccacatacgtggaaacaatcctgttactctgtcccacgtccaatcatgggccacaaggcacagtcttctgagcgagtgctctcactgtattagagcgccagctccttggggcagggcctgggcctcatggcttttgctttccctgaagccctagtagctggcgcccatcctagtgggcacttaagcttaattggggaaactgctttgattggttgtgccttcccttctctggtctccttgagatgatcgtagacacagggatgattcccacccaaacccacgtattcattcagtgagttaaacacgaattgatttaaagtgaacacacacaagggagcttgcttgcagatggtctgagttcttgtgtcctggtaattcctctccaggccagaataattggcatgtctcctcaacccacatggggttcctggttgttcctgcatcccgatacctcagccctggccctgcccagcccatttgggctctggttttctggtggggctgtcctgctgccctcccacagcctccttctgtttgtcgagcatttcttctactcttgagagctcaggcagcgttagggctgcttaggtctcatggaccagtggctggtctcacccaactgcagtttactattgctatcttttctggatgatcagaaaaataattccataaatctattgtctacttgcgattttttaaaaaatgtatatttttatatatattgttaaatcctttgcttcattccaaatgctttcagtaataataaaattgtgggtggaaattcttaaaaaaaaaaaa

SEQ ID NO: 74 - DNA, 1054 bp, Homo sapiens
  CDS (81)..(719)
  misc_feature (1)...(1054): n = a,t,c or g
gccctgtccggaattcccgtgtcgactatttcgttgagcccgctgcccgcccgcagttcccggccccgctggccccagtcatggcgaagcagtacgatgtgctgttccggctgctgctgatcggggactccggggtgggcaagacctgcctgctgtgccgcttcaccgacaacgagttccactcctcgcacatctccaccatcggtgttgactttaagatgaagaccatagaggtagacggcatcaaagtgcggatacagatctgggacactgcagggcaggagagataccagaccatcacaaagcagtactatcggcgggcccaggggatatttttggtctatgacattagcagcgagcgctcttaccagcacatcatgaagtgggtcagtgacgtggatgagtacgcaccagaaggcgtccagaagatccttattgggaataaggctgatgaggagcagaaacggcaggtgggaagagagcaagggcagcagctggcgaaggagtatggcatggacttctatgaaacaagtgcctgcaccaacctcaacattaaagagtcattcacgcgtctgacagagctggtgctgcaggcccataggaaggagctggaaggcctccggatgcgtgccagcaatgagttggcactggcagagctggaggaggaggagggcaaacccgagggcccagcgaactcttcgaaaacctgctggtgctgagtcctgtntggggcaccccacacgacacccctcttccctcaggaggcccgtgggcagacaggggagccggggctttgccctgctgctgtcctctcatgtgatgaccctattgagtatcagtagccactactccccctgcctggccctgagagcggctctgctgtcatctcaagcagcccctgtccccagcccgtccaccctggagtggtcttcttcagcctgtttccccgaccacaggcctgctacgacccccacgatgtgccgcaagcactgtctcaccatcccgcacccaccagacaacagccagggctggagtccaggccaaaaaaaaaaaa

SEQ ID NO: 75 - DNA, 3962 bp, Homo sapiens
  CDS (652)..(3900)
ggagaaaatttacagaaacccagagccaaaggtgctctcaggggatcccctgaaacattcaaagccattgcggccccagaagcttgggtaggcggggaagcagctggagtgcgaccgccgcggcagccaccctgcaaccgccagtcggaggtgcagtccgtaggccctggcccccgggtgggcccttggggagtcggcgccgctcccggggagctgcaaggctcgcccctgcccggcgtggagggcgcggggggcgcggaggatattcttggtgatcttggaagtgtccgtatcatggaatcaatctctatgatgggaagccctaagagccttagtgaaacttttttacctaatggcataaatggtatcaaagatgcaaggaaggtcactgtaggtgtgattggaagtggagattttgccaaatccttgaccattcgacttattagatgcggctatcatgtggtcataggaagtagaaatcctaagtttgcttctgaattttttcctcatgtggtagatgtcactcatcatgaagatgctctcacaaaaacaaatataatatttgttgctatacacagagaacattatacctccctgtgggacctgagacatctgcttgtgggtaaaatcctgattgatgtgagcaataacatgaggataaaccagtacccagaatccaatgctgaatatttggcttcattattcccagattctttgattgtcaaaggatttaatgttgtctcagcttgggcacttcagttaggacctaaggatgccagccggcaggtttatatatgcagcaacaatattcaagcgcgacaacaggttattgaacttgcccgccagttgaatttcattcccattgacttgggatccttatcatcagccagagagattgaaaatttacccctacgactctttactctctggagagggccagtggtggtagctataagcttggccacattttttttcctttattcctttgtcagagatgtgattcatccatatgctagaaaccaacagagtgacttttacaaaattcctatagagattgtgaataaaaccttacctatagttgccattactttgctctccctagtataccttgcaggtcttctggcagctgcttatcaactttattacggcaccaagtataggagatttccaccttggttggaaacctggttacagtgtagaaaacagcttggattactaagttttttcttcgctatggtccatgttgcctacagcctctgcttaccgatgagaaggtcagagagatatttgtttctcaacatggcttatcagcagtctacacttggatatgtcgctctgctcataagtactttccatgttttaatttatggatggaaacgagcttttgaggaagagtactacagattttatacaccaccaaactttgttcttgctcttgttttgccctcaattgtaattctggatctgtctgtggaggttctggcttccccagctgctgcctggaaatgcttaggtgctaatatcctgagaggaggattgtcagagatagtactccccatagagtggcagcaggacaggaagatccccccactctccaccccgccgccaccggccatgtggacagaggaagccggggcgaccgccgaggcccaggaatccggcatcaggaacaagtctagcagttccagtcaaatcccggtggttggggtggtgacggaggacgatgaggcgcaggattccattgatcccccagagagccctgatcgtgccttaaaagccgcgaattcctggaggaaccctgtcctgcctcacactaatggtgtggggccactgtgggaattcctgttgaggcttctcaaatctcaggctgcgtcaggaaccctgtctcttgcgttcacatcctggagccttggagagttccttgggagtgggacatggatgaagctggaaaccataattctcagcaaactaacacaggaacagaaatccaaacactgcatgttctcactgataagtgggagcttgccatttttgaaaaagaaagtgtcggatgaaataacttatgctgaagatactgctaattcaattgcacttctgggtgacttaatgaaaataccaagttctgaattgaggatacaaatttgtaagtgtattgttgatttttatcatgcagaaccaccaaagaagcatattccagaagttaattgtactataatgatgaaagcacaagcagccagtggaatctgtactcacctcaatgacccagatccctctggacagcttttatttcgttcatcagaaatactttggaacttgctggaaaaatcttcaaaagaagaagtcatacaacagcttagtaacttggaatgtttgctggctttgaaggaagtatttaaaaatctgtttatgagaggtttcagtcattatgaccgtcagcttagaaatgacatattagtgatcactacaattatagctcaaaatcctgaagcaccaatgattgaatgtggctttaccaaggatttgatactgtttgccacctttaatgaagttaaaagtcaaaatcttttggtaaaaggacttaagctttctaattcctatgaagattttgagttgaagaaattactattcaatgtaattgtgatcttatgtaaagatttacctactgtacagctattaattgatggcaaagttattttggctttgtttacctatgttaagaagcctgagaagcaaaaaataattgactggtctgcagcacagcatgaagaattacaactgcatgcaattgccactttgtcatcagtggctcctttattaatagaagaatacatgtcatgccagggaaatgctcgagtccttgcatttctagaatggtgtgagagtgaagatccgtttttcagtcatggtaacagttttcatggtacaggtggccgaggcaacaagtttgcccagatgcgttacagtttaagactcctgagagccatggtctaccttgaagatgagactgtaaacaaagatctttgtgaaaagggaacaattcagcaaatgataggtcttcatgacctgtatcttgtgcgacctcctatctcatcctgtgacttagaatgccgtgaccatctgggaatgcagcacagtacccctctttatgacagaacaatacagaaagacaaagtacaccagattggctacaggttaagattaggctttcaaatcatttctcccattaatcaaaactttacagaggagacagtgatttttaccattcattcaactggtttgcacagaggggaagggaagggaaaaagggaagggagcattgcttttggcagtgtggggaagattggagaaatatggaatgaaatatatgaagaaataaaattagaaaaattaagaccagtcactacagataaaaaagctttggaagctattacaacagcatcagaaaatattggaaagatggttgcttctctgcaaagtgatataattgaaagccaagcatgccaagacatgcaaaatgaacaaaaagtatatgcaaaaatacaggccacgcacaagcaaagagagctggctaataaatcatgggaagatttcttggctagaacatcaaacgctaaaacgttaaagaaagcaaaaagccttcaagaaaaagctatagaagcctccagataccataaacgaccacaaaatgcaatatttcaccaaacacatattaaaggccttaacacaacggtgccctctggtggagtagtaacagtggaaagcactcctgcccgattagtaggaggacctctggttgatacggatattgctcttaaaaaactgcccattcgaggaggagccttgcagagggtgaaagcagttaaaattgtggatgcaccaaaaaagagtattcctacgtaatatactatagagactttttgaaataaagtcagcttataattttttagctgaaaaaaaaaaaa

SEQ ID NO: 76 - DNA, 2101 bp, Homo sapiens
  CDS (336)..(1346)
acttgaatgaagcagtcccagagacagagcgcctggattcaaaagcactgaaaactcgagcccagctctctgtgaagaacagacgccagagaccctctaggacaagactgtatgatagtgttagttccacagatggggaggacagtctagagagaaagccatcaaacagtttctataaccacatgcatattaccaaattacttccacctaagggtttgagaacgtcttctccagaatcagattctggtgttccacccctcaccccggtggatagcaatgtgcccttctcgtctgaccacatagctgaatttcaagaagaaccactggacccagaaatggggcctctctcctctatgtggggagacacttcactgttttctacttcaaagtctgatcatgatgtggaagaatctccttgccatcaccaaaccaccaacaagaaaatattacgagaaaaagatgatgccaaagatcccaaatcactaagggcatccagttcattggcggtgcaaggaggaaaaattaagcggaagtttgtggatctgggggcgcctttgcgaaggaattccagcaagggaaagaagtggaaagaaaaagaaaaagaagccagtaggttttctgcaggtagcaggatcttcagaggcagactggaaaactggacacccaagccatgttcaacagctcagacctccactcgttccccttgcatgcctttctcatggtttaatgacagccggaaaggatcctattccttcaggaacctgcctgcgcctacaagttcccttcagccttctcctgagactctaatttcagataaaaaggggtccaagaattttaccttcaatgatgacttcagtcccagcagtaccagttcagcagacctcagcggcttaggagcagaacctaaaacaccagggctctctcagcccttagcactgtcatcagatgagatccttgatgatggacagtctcccaaacacagtcagtgtcagaatcgggccgttcaggaatggagtgtgcagcaggtttctcactggttaatgagcctaaatctggagcagtatgtatctgaattcagtgcccaaaacatcactggagaacagctcctgcagttggatggaaataaacttaaggctcttggaatgacagcatcccaggaccgagcagtggtcaaaaagaaactcaaggaaatgaagatgtctctagagaaggctcggaaggcccaagagaaaatggaaaaacaaagagaaaagctaaggagaaaggagcaagagcaaatgcagaggaagtccaaaaagacagaaaagatgacgtcaactacagccgagggtgctggtgagcagtaacacataccctcttacagatgatggagatgctccaagagaagtccccacctcttcctgccctgctctcctccagaggatgaaaaagaaactaaatgataagggtaatgcggctctaggccggctgaggaactgtgtgttgaataactgcattttctgcaatagaatgcactcttaattttaactactaaaataatcccaagccacctttggttcattaacaaaccagagatttcatttaagtagctgtgttttgctcttctctaacttaccaacatcttgtgttgtgttgggtgtgttttgtcacttggagaactagtgtgaccccacccaagagcatgacacaccctggtgttgttaatggagcgccgtgaattttcagtgtgggatcctgaaatggcaattgcacatgtctgcatggcagagagcaccctgccatgagatctgagaccagtacttaacttctaggactgcaacacctactccaatgtgtgggaaagatttgctcttaattctcagtctggacagtgagaccaccccgctgtggaaacatgggtgctctgctctgtagttacctactaagggaaaaggcaagcaagtcattctgcttgctaggcatcaaaaagaaagaaaaaaaattatagctatttgttaaccactgaaaaaagcaaaagccttaagaatgtggatgtgggtattaccttggggttctgagggtaatatttatcctctagatacggctgaacaaaaaaaaaaaa

SEQ ID NO: 77 - DNA, 3087 bp, Homo sapiens
  CDS (544)..(2964)
ccgcaattcccgggtcgacgagttcgtgtttcagtaaaagatgatgaaagccactatcaattctcactgctgagtggcagggagaagcagcaccactctcagctcttttctaatcttgtaacttagtgctagaagtctctccaggctattaccatgggcatttgttctctgttggagctgtaagcagatgaacccaagtagagaagatagatcttggaaggagagatccattgagtccagaagccagatcagcaaatggaggaacctcggaggtgaccagaaagatctccatcggttgcccaaggctagccttggaggagcctccctcggggtcaggaatcgagcggggacaccgctgggccactcggaaggaccgtttcctggggactgatcaagaggagggaaggtcctattacagcccagaggccacgtggggcctgagccccaaacctcagctgctgttccagcagccccgtagctgggtggagcctccgggcctgacgtgggccttcactggagaagtgactcagggatcctcccaggatgtctgcctcaccagacgacctgagtacagggggaaggttacagaacatgacagtggatgaatgcttccagtctcggaacaccgtcctccaggggcagccctttgggggtgtccccaccgtgctgtgcctcaacatcgccctgtgggtgctcgtccttgtggtttactccttcctccggaaagctgcgtgggactatgggcgcctggctctgctgatacacaatgacagcctgacctcgctgatctatggggagcagagcgagaagacatctccctcggagacttccttggagatggaacgcagagacaagggattctgttcctggttcttcaacagcataacaatgaaggacgaggatctgattaacaagtgtggggacgacgcgcgcatctacatcgtgttccagtaccacctcatcatctttgtgctcatcatctgtatcccctccctgggcatcattttgcccatcaactatactggatctgttctggactggagcagtcactttgctcggaccaccattgtcaatgtctccacagagagcaagctcctgtggctgcatagcctgctgtccttcttctacttcatcaccaacttcatgttcatggctcatcactgcctggggtttgcgcccaggaatagccaaaaggtcacaaggacactaatgatcacctatgtgcccaaggacattgaagacccagaactcatcattaagcattttcacgaggcctatccaggcagtgtcgtgacaagagtccacttctgctacgacgtcaggaacctgatcgacttggacgatcagaggcgccatgccatgcggggccggcttttctatacagccaaggccaagaagactgggaaggtgatgatcaggatccacccctgtgcccgcctgtgcttctgcaagtgctggacctgcttcaaggaggtggatgcagagcagtattacagcgagctagaggagcagctaacggacgagttcaacgccgagctcaaccgcgtgccgctcaagcggctggacctgatctttgtcaccttccaggactccaggatggccaagcgtgtccgtaaggattacaagtatgtccagtgtggtgtgcaaccccagcagtcctcagtgaccaccatcgtcaaatcatattactggagggtcactatggccccacaccccaaagacattatttggaaacacctgtctgtccgccgcttcttttggtgggcccgctttatcgcaatcaacaccttcctcttcttcctcttcttctttctcaccacgcctgccatcatcatgaacactatcgacatgtacaacgtcacccgccccatcgagaagctgcagaacccaattgtgacccagttcttcccctctgtgatgctctggggcttcacagtgatactgcctctgattgtctacttctccgccttcctcgaggcccactggaccagatcaagtcagaatctggtcatggtgcacaagtgctacatctttctggtgttcatggtagtcattctgccctctatgggactgaccagtttggatgtctttctccgctggctctttgacatctactatctagagcaagcatccatcaggttccagtgtgtgttcctgccagacaacggcgccttctttgtcaactacgtgatcacggcagctttacttggcacaggcatggagctgctgcgtctggggtcactcttctgctacagcacccgcctcttcttctctagatcagagccagagagagtcaacatcagaaagaaccaggccatagacttccagtttgggcgtgagtatgcgtggatgatgaacgtgttcagcgtggtgatggcgtacagcatcacttgccccatcattgtgccttttgggttgctctacctgtgcatgaagcacttgacggatcgctataacatgtactactcctttgcacccaccaaactgaacgagcagatccacatggctgccgtctcccaggccatctttgcgccactcttgggtctgttctggatgctgttcttctccatcctgcggttgggttctctccacgccatcaccatcttttccctgtccaccctcctcattgccatggtgattgcctttgttggcatttttctggggaagcttcggatggttgccgactacgagcccgaggaggaggagatccagacagtgtttgacatggagccaagcagcacctcctccacgcccacctccctcctgtatgtggccaccgtgctgcaagaaccggagttgaatctgacccccgcctcctccccagccaggcacacctatggcaccatgaacaaccagccggaagagggagaagaagagagtggtctgaggggctttgcgagggagctagactcggcccagttccaggaagggctggaactggagggccagaaccagtaccactgaccgggacctgaggcctccactggcgacttgttgaggggtcaggggagggcctggcaaggggaggcaggagggtggcctggacctccccactacctcctgcagactttgagaagcctacagtgg

SEQ ID NO: 78 - DNA, 1625 bp, Homo sapiens
  CDS (164)..(1402)
gtggcgcctgctctccatccaggccccattccggctcccacccgacgctgcttttgttcccacgtttcggggggcagctggcactgtgattcctgccccatgagtgcctagaggcacggagccaccagggatcaccccacgtgggacacagggcttggggaggatggggcaggaccagaccaagcagcagatcgagaaggggctccagctgtaccagtccaaccagacagagaaggcattgcaggtgtggacaaaggtgctggagaagagctcggacctcatggggcgcttccgcgtgctgggctgcctggtcacagcccactcggagatgggccgctacaaggagatgctgaagttcgctgtggtccagatcgacacggcccgggagctggaggatgccgacttcctcctggagagctacctgaacctggcacgcagcaacgagaagctgtgcgagtttcacaagaccatctcctactgcaagacctgccttggcgtgccaggtaccagggcaggtgcccagctcggaggccaggtcagcctgagcatgggcaatgccttcctgggcctcagcgtcttccagaaggccctggagagcttcgagaaggccctgcgctacgcgcacaacaatgatgacaccatgctcgagtgccgcgtgtgctgcagcctgggcagcttctatgcccaggtcaaggactacgagaaagccctgttcttcccctgcaaggcggcagagcttgtcaacaactatggcaaaggctggagcctgaagtaccgggccatgagccagtaccacatggccgtggcctatcgcctgctgggccgcctgggcagtgccatggagtgttgtgaggagtctatgaagatcgcgctgcagcacggggaccggccactgcaggcgctctgcctgctctgcttcgctgacatccaccggagccgtggggacctggagacagccttccccaggtacgactccgccatgagcatcatgaccgagatcggaaaccgcctggggcaggtgcaggcgctgctgggtgtggccaagtgctgggtggccaggaaggcgctggacaaggctctggatgccatcgagagagcccaggatctggccgaggaggtggggaacaagctgagccagctcaagctgcactgtctgagcgagagcatttaccgcagcaaagggctgcagcgggaactgcgggcgcacgttgtgaggttccacgagtgcgtggaggagacggagctctactgcggcctgtgcggcgagtccataggcgagaagaacagccggctgcaggccctaccctgctcccacatcttccacctcaggtgcctgcagaacaacgggacccggagctgtcccaactgccgccgctcatccatgaagcctggctttgtatgactcctggcagcaggcgtgggcttcctcctcgccactcctgctctttctccactgcacgccagaggcccatttactcctggggcagctgccaggtcgtcctcaccatagccaaggccttggggcctgcccagggctgctcccctgggcccagctcccctccctgcctctttgtactttgctctttatagaaaaataaactgtttgtacctggaaaaaaaaaaaa

SEQ ID NO: 79 - DNA, 1639 bp, Homo sapiens
  CDS (337)..(1494)
atgcgcctttctcattggccgcgccgcttgctagcttcgggcggaggggagcgccgggccgacggtgggcggtcacgtgacggttacgactgcactctcgctggtgtcggtgggcggtcacgtgatggttatggccgcactctcgctggtggcggcctgttgggccaaccttttggggtgtgtgtgaatggagctgtggacatttgctgtccctgggccttgtctcaggcacaagcgatgatggtggtggcagctctgtcccaggctgacttcctgccagctgctccaggctattcctgggcggctccagggagcagtgtcagggccagggagacgatggtctccgtgactatggccacttccgagtggatccagttctttaaggaagccggcattcctccaggacctgccgtcaattatgccgtgatgtttgtggataataggattcagaagagcatgctgctggatctcaataaggagataatgaatgagctgggcgtgaccgtggtgggtgacatcatcgccattctcaagcatgccaaagtggtgcaccgtcaggacatgtgcaaagctgccactgagtcagtaccctgcagccctagcccccttgcaggcgaaattcgccgtggcaccagtgctgcctcccgaatgatcaccaacagcctgaaccatgactctccacccagcacaccccccaggcgcccggacaccagcacctccaagatctcggtcactgtgtccaacaagatggcagcaaagagtgccaaggccactgcagccctggcccgccgggaggaggagagcctggctgttcctgccaagcggcgccgggtcactgctgagatggaggggaagtacgtcatcaacatgcccaaaggcaccacaccccgcacccgcaagatcctggagcagcagcaggctgcaaaaggtctccataggacgtctgtgtttgaccgcctcggcgccgagaccaaggcagacaccacgacagggagtaaacccacaggagtcttcagccgcctgggggccaccccagaaacggacgaggatctggcttgggacagcgacaatgacagcagcagctctgtcttgcagtatgccggggtcctgaagaagctaggacggggcccagccaaggccagtccccagccagcactgactgtcaaagccaaggccacaagctcagcgacaacggctgctgccccgacactgcggcgcctggcgctttcctcacggtctgggcttgagaggaagccggagtccttgtctaaagtcagcatcatcaagagactgggcgcagctgcccttgtgcccgaggcccaggacagccaggtcaccagcaccaagagtaagtcctcagccgaggtcaaggtcaccattaagaggactctggtggggccccgggggagcagctccagcgagggccttggtgcccagatggaccacgcgggcactgtgagcgtgttcaaaagactgggccgcaggaccttctagcccacctgtgggcggggtgcaggcagcagagcctgcgggcatctgcctggccgccccaggctcctggcttcatcacgcctcccaccagctcctggatgacacagcttgtctccctcgggctctagagctaggcccgagcattcgc

SEQ ID NO: 80 - DNA, 12279 bp, Homo sapiens
  CDS (8405)..(12226)
atgtcgggccctcgcgccggcttctaccggcaggagctgaacaagaccgtgtgggaggtgccgcagcggctgcaggggctgcgcccggtgggctccggcgcctacggctccgtctgttcggcctacgacgcccggctgcgccagaaggtggcggtgaagaagctgtcgcgccccttccagtcgctgatccacgcgcgcagaacgtaccgggagctgcggctgctcaagcacctgaagcacgagaacgtcatcgggcttctggacgtcttcacgccggccacgtccatcgaggacttcagcgaagtgtacttggtgaccaccctgatgggcgccgacctgaacaacatcgtcaagtgccaggcgctgagcgacgagcacgttcaattcctggtttaccagctgctgcgcgggctgaagtacatccactcggccgggatcatccaccgggacctgaagcccagcaacgtggctgtgaacgaggactgtgagctcagggtgaggcccgtgggcaggggtgggcagggcggcggcggagcccgtgcggagcttgagaacaccacgtggtcgccccagatcctggattttgggctggcgcgccaggcggacgaggagatgaccggctatgtggccacgcgctggtaccgggcacctgagatcatgctcaactggatgcattacaaccaaacagtggatatctggtccgtgggctgcatcatggctgagctgctccagggcaaggccctcttcccgggaagcgactgtatccttggcccaggagagcgggctctgggcagcgccccaaagttttgggtctgggggcccaggaggggtctgtggctggcccgtgggtgtttcctgagtgacacagacattgaccagctgaagcgcatcatggaagtggtgggcacacccagccctgaggttctggcaaaaatctcctcagaacacgcccggacatatatccagtccctgccccccatgccccagaaggacctgagcagcatcttccgtggagccaaccccctggccatagacctccttggaaggatgctggtgctggacagtgaccagagggtcagtgcagctgaggcactggcccacgcctacttcagccagtaccacgaccccgaggatgagccagaggccgagccatatgatgagagcgttgaggccaaggagcgcacgctggaggagtggaaggagctcacttaccaggaagtcctcagcttcaagcccccagagccaccgaagccacctggcagcctggagattgagcagctccggccctccccaggctccggccctcccccggcggcggccgcctcgggtttccggaggggccggagggcgggcgagggcgtcacgtgcgcgccgcccgcgggccgtggcttttaccgccaggaggtgaccaagacggcctgggaggtgcgcgccgtgtaccgggacctgcagcccgtgggctcgggcgcctacggcgcggtgtgctcggccgtggacggccgcaccggcgctaaggtggccatcaagaagctgtatcggcctttccagtccgagctgttcgccaagcgcgcctaccgcgagctgcgcctgctcaagcacatgcgccacgagaacgtgatcgggctgctggacgtattcactcctgatgagaccctggatgacttcacggacttttacctggtgatgccgttcatgggcaccgacctgggcaagctcatgaaacatgagaagctaggcgaggaccggatccagttcctcgtgtaccagatgctgaaggggctgaggtatatccacgctgccggcatcatccacagagacctgaagcccggcaacctggctgtgaacgaagactgtgagctgaagatcctggacttcggcctggccaggcaggcagacagtgagatgactgggtacgtggtgacccggtggtaccgggctcccgaggtcatcttgaattggatgcgctacacgcagacggtggacatctggtctgtgggctgcatcatggcggagatgatcacaggcaagacgctgttcaagggcagcgaccgtatcctccagccgcagggcggcaccaggggcggctgtgttcctgacctcggtgcagacctggaccagctgaaggagatcatgaaggtgacggggacgcctccggctgagtttgtgcagcggctgcagagcgatgaggccaagaactacatgaagggcctccccgaattggagaagaaggattttgcctctatcctgaccaatgcaagccctctggctgtgaacctcctggagaagatgctggtgctggacgcggagcagcgggtgacggcaggcgaggcgctggcccatccctacttcgagtccctgcacgacacggaagatgagccccaggtccagaagtatgatgactcctttgacgacgttgaccgcacactggatgaatggaagcggcatccgggcctgggggacgtgatcgccatcagttccggagccacgctgacttgtggcatggctgctgtccacactgggcccaaagtgtgggcccataggtggcctgaggactgggggccccaaaattctgtgacccagctggatgtgaactcccgcgggggcagggtcttcctgcgcccgggccgggtgggccttggggctgcgctggaccctgacccagctggtgcagaacggggctctcatgggcaggctcggccacgggcgttcggccccgagtgcgagatcgagcgtcctgagcgcctgaccgcagccctggatcgcctgcggcagcgcggcctggaacagaggtgtctgcggttgtcagcccgcgaggcctcggaagaggagctgggcctggtgcacagcccagagtatgtatccctggtcagggagacccaggtcctaggcaaggaggagctgcaggcgctgtccggacagttcgacgccatctacttccacccgagtacctttcactgcgcgcggctggccgcaggggctggactgcagctggtggacgctgtgctcactggagctgtgcaaaatgggcttgccctggtgaggcctcccgggcaccatggccagagggcggctgccaacgggttctgtgtgttcaacaacgtggccatagcagctgcacatgccaagcagaaacacgggctacacaggatcctcgtcgtggactgggatgtgcaccatggccaggggatccagtatctctttgaggatgaccccagcgtcctttacttctcctggcaccgctatgagcatgggcgcttctggcctttcctgcgagagtcagatgcagacgcagtggggcggggacagggcctcggcttcactgtcaacctgccctggaaccaggtgcccaccctcaagccccagtttgaccctgagctggtgctggtctcggcaggatttgactcagccatcggggaccctgaggggcaaatgcaggccacgccagagtgcttcgcccacctcacacagctgctgcaggtgctggccggcggccgggtctgtgccgtgctggagggcggctaccacctggagtcactggcggagtcagtgtgcatgacagtacagacgctgctgggtgacccggccccacccctgtcagggccaatggcgccatgtcagaggtgcgaggggagtgccctagagtccatccagagtgcccgtgctgcccaggccccgcactggaagagcctccagcagcaagatgtgaccgctgtgccgatgagccccagcagccactccccagaggggaggcctccacctctgctgcctgggggtccagtgtgtaaggcagctgcatctgcaccgagctccctcctggaccagccgtgcctctgccccgcaccctctgtccgcaccgctgttgccctgacaacgccggatatcacattggttctgccccctgacgtcatccaacaggaagcgtcagccctgagggaggagacagaagcctgggccaggccacacgagtccctggcccgggaggaggccctcactgcacttgggaagctcctgtacctcttagatgggatgctggatgggcaggtgaacagtggtatagcagccactccagcctctgctgcagcagccaccctggatgtggctgttcggagaggcctgtcccacggagcccagagctggggtgtgggagaagggctgctggaggcaatgccaggtgggtctccagcacagaggctcagcagtcacagcacccctgcccatggccccgtgaatgctcttccacctctgcctctgcggtttgggctcaggaggatgaccggtggtttcctgagctgcatcttgggcttggtgctgcccctggcctatggcttccagcctgacctggtgctggtggcgctggggcctggccatggcctgcagggcccccacgctgcactcctggctgcaatgcttcgggggctggcagggggccgagtcctggccctcctggaggagaactccacaccccagctagcagggatcctggcccgggtgctgaatggagaggcacctcctagcctaggcccttcctctgtggcctccccagaggacgtccaggccctgatgtacctgagagggcagctggagcctcagtggaagatgttgcaggcccatgcaacccacgctcggtcccgttccggcccctgcgccccgctgcgcttcgctccccgcccttgcgccgttagtaaacatcgctcaaacgaaacgctggctctgcctcctttactgagcacgctcggcctcggtctctcacccgcggtgccggactcaggccggaagtatgccgcggcccaggcctcaccaacttcacgcgctgccggcgttcccgtgacgtatttccggcgcgcccgccctagtgctcttcacactggcgcggctgtgacgcgacggaggcggcgagagcggcagccgtgggcactttccacgggtgaggcctggagaacgggtggacgtgcaggccagaacccgggacccacccggctgagcccccagactctccgctgcccacgaccctcggagtggcaccctctcctggccgtctcctctcgtgggtcccgaagaacgggtgcaaagccgagttcgtccgctgtactgcgcgggcgcgcgtttcgttcttcggttttgccacggttctgtgactccctaaaggttgagggctactgaattagaagaaacgccgagctggcttctggtgggctgccgggcgccgggcagcgtgcttggactggggagggcagggcgtgtttactctgagtagagcaaccgcaagacctcctttaaaaaataccagttctgagcttcggcattggagaggccgcctgtcattcagcctcttcggaccctctctcactccctgtcttccggagcgtgagtgaagcccgggtgaggtgttttcccacacgccgggggcccggagctgagaaggggcatggccagcatcacgcagctgttcgacgacctgtgtgaggccctcctgccggctgccaagactcacctgggccagcgcagtgtgaaccggaagagggcaaagcggagcctcaagaaggtggcctacaatgctcttttcacaaatctttttcaagatgagactcaacagctgcagcctgacatgtcaaaactaccagcgagaaacaagatcctcatgttgtcctttgacttgagagtgggtggcctgggccccaaggccgaccgtttggaggagcttgtggaggagctggaagcagccccttgctgtccgcttttggaggtggggtctgttttggacctcctggttcagctggcagggagtggtccccctcaagttctgccgagaaaacgagactacttccttaacaacaagcatgtggggagaaacgttccgtacagcggctatgattgcgacgacctgagtgtgtttgagatggacgttcagtctctgatctccagagaagagtgtttgtgtcacagcatgatccaggaaacacttcaggttatggaggctgctccaggcactggcctgcccaccgtcgggctcttctcatttggtgacccttgtggtgacaggttcgagagagacacccgggtctcgctcttcggggcccttgtgcacagccgcacttatgacatggacgtccgactgggcctgccccccgtgccagacaatgcggacctctctgggctggctattaaggtcccaccgagtgtggatcagtgggaagacgaaggattccagtcagcgtccaacttgactcctgattcccagtctgagcccagcgtgaccccagacgtggacctgtgggaagccgcacttacctatgaggccagcaagcggaggtgctgggagcgagttggctggctgaatgatgggcaggggtctgcacggacggtctgtgtttatcctcctctgttgggggctcaggctcctctccccctggctgttgtggatgttgttgccgtggacgggggtgtggatgctgctgtggacaggcatgtggatgttgccgtggacaggcatgtggataggcatgtggatgttgccgtggacagggatgtggatgctgccatggacaggagtgtggatgatgctgccgtggacagggatgtggatgatgctgccgtgaataggggtgtagatgctgccatggactggggtgtggatgctgccatggacacgggtgtggatgatgctgcagtggatagggttgtggatgatgttcccatggacaggggtgtggatactgctgtggacaggggtgtggctgatgctgccgtggacagggggggtgtggatgatgctgcggtggacctgggtgtggatgctgccatggacgggagtgtgggcgatgctgccgtggacctgggtgtggatgctgctgtggacaggggtgtggatgatgctgccatggggggtgtggatgatgctgctgtggacctggatgtggatgctgctgtggacgggggtgtgggtgctggtaccatggggggtgtggatgatgctgctgtggacctgggtgtagatgctgctgtggacggggggggtgtggatgatgctgctgtggataggggtgtggatgatgctgccgtggacgggggtgtgggcgatgctgccgtggacctgggtgtggatgatgctgctgtggaactgggtgtggatgctgctgtggacaggggtgtggatgctgctgctgtggacgggggtgtgggcgatgctgctgtggacctggatgtggatgatgctgccgtggacttgggtgtggatgctgctgtggacaggggtgtggatgatgctgccgtggacctgggtgtggatgctgctgtggacaggggtgtggatgctgctgtggacaggggtgtggatgatgctgccatggagggtgtggatgatgctgctgtggacctgggtgtagatgctgctgtggacgggcgtgtggatgatgctgccgtggatgggtggggtgtggatgctgccatggatggggtatggatgatgctgccatggacagggggtgtggatgatgctgcagtggacctggatgtggatgctgctgtggacaggggtgtggatgatgctgccatgaacagggatgtggatgctgccatggacctgggtgtggatgctgccatggacaggggctgggccagtcggatacccccggccatgcccaggaccccaggaagcccccctggccacagagaggagccttacctgacggaggcgggaagggacgctttcgacaagttctgcaggctccaccaaggggagctccagctgcttgctgggggcgtcctacaggccccgcagcccgtgctggtgaaggagtgcgagctggtgaaagacgtgctgaacgtcttgattggggtcgtgtctgccacgttttcgctctgccagccggcccaggcctttgtggtgaagcggggcgtccacgtgtcaggagcgtctcccgagagcatcagcagcctgctctcggaagtggccgagtatgggacctgctacacgcgcctgagtcatttctctctgcagcccgtcctggactctttgtacagcaagggcctcgtgttccaggccttcaccagtggcctgaggaggtacctgcagtattaccgggcctgcgtcctttccactccgcccaccctgagcctcctcaccattggttttctcttcaagaaacttggccggcagctcaggtacctggccgagctctgtggcgttggcgctgtgctcccgggcacctgtggaggaggccccagggccgcgtttcccaccggcgtgaagctgctgtcctacctctaccaggaggctctgcacaactgcagcaacgagcactaccctgtactgctgtccctgctgaagaccagctgcgagccctacacccggttcatccacgactgggtgtacagcggggtgttcagagacgcttatggcgagttcatgattcaggtgaaccacgagtacctcagcttccgagataagttgtactggacacatggctacgtgctcatctccaaagaggtggaggactgtgttcccgtgtttctgaagcacattgcccacgacatatacgtctgcggaaagaccattaacctgctgaagctctgctgcccccggcattacctctgttggtccgacgtccctgtcccccggatctcggtgattttctcccttgaggagttgaaggagattgagaaggactgtgccgtctacgttgggcgcatggagagggtggcccgccacagctctgtcagcaaggaggagaaggaattacgtatggaaattgcaaaacaagaattaatcgctcatgcccgggaagcagcatccagggtcctgagtgcactgagtgaccggcagatgtcagaacggatggccttggatgcccggaagcgtgagcagtttcagaggctgaaagaacaatttgtgaaggaccaggagcgacgccaggcggccaggcaggaggagctggatgatgacttcagctacgcccgtgaactccgagacagggagagaaggctgaagtccctggaggaggagctggagaggaaggcgaggcaggcactggtcgaccactacagcaagctctctgcagaggcagctcgtcgggagcagaaggcactgtggagaatccagaggcaccgactggagagtgcacggcttcgttttctcttagaagatgagaaacacattcaggagatgctgaaagcagtgtctgaggctcaccagccccaggagccgccagacgtcctcttgagcgtgcacccccaggtcacgtctccgggccctgagcacccagagggaggccaaggctgtgattctgggtctgcagagcaacactcgcctgcctgggatggctggaacaggccaggcctgctgaccccacagccccttaagcctctagcagtgggggctggtggcagggggctgcagcaggcggagggggccagacccttctctgacagcctcagcattggagacttcctacctgtgggcccaggggctgagccgtccgtgcagactggcatggtccctctcctggaggtggcgctgcagaccattaacttggacctgcccccctcagctcctggggaggcacccgcagcagccagcactcagccctccaggccacaggagtacgactttagtactgtcctgaggccagctgtggccacctcacctgcaccagggcccctgcaggctgcagagtgcagcttgggcagctcagggctacagctgtgggaggacagttgtgggaagatggatgcctgtggctccgcctcgcgggagactctgctcccctcacacccacccaggcgtgctgctctggaggaggggagcagccagcccacagagcggctctttgggcaggtgtcagggggtggtcttcccacaggggactacgcttctgaaatagctcccacccggccacggtggaacacccacgggcacgtgtctgacgccagcatcagggtcggggagaatgtgtcagatgtggctcccacccagccacggtggaacacccacggacacgtatccaatgccagcatcagcttaggggagtctgtgtcagatgtggctcccactcggccacggtggaacatccatggacatgtgtccaacgccagcatcagggtcggggagaatgtgtcagatgtggctcccaccaggccacggtggaatacccacgggcacgtgtccaacgccagcatcagggttggggagaacgtgtcggacgtggctcccacccggccacggtggaacacccatggacacgtgtccgatgccagcatcagcttgggggagtctgtgtcagacatggctcccgcccggccacggtggaacacccatggacacgtgtctgatgccagcatcagcttgggggagtctgtgtcagacatggctcccacccggccacggtggaacacccacggacatgtgtctgacaccagcatcagggttggggagaacgtatcggacgtggctcccatccggtcacggtgcaacacccatggacacgtgtccgacgccagcatcagcttgggggagcctgtgtcggatgtggtttccacccggccacggtggaacacccatgtacccatccctccgccccacatggtgctgggggctctctcaccagaagctgagcccaacacacccaggccccaacagagcccccctggccacacgtcccagtcagcgctcagcctgggagcacagagcactgtgctggactgtgggccacggctgcctgtagaagtggggccatctctgtcctcccccagctcgggctgcggggaggggagcatcagcgtgggggagaacgtgtcagacgtggctcccacccaaccatggtggcccaacaccccgggagacagtgtctctgaagaactaggccctgggaggagcggggacactgaggacctctctccaaattggcctctcaactcacaggaagacacagctgcccagagcagcccaggccgtggtgaggaggcggaggcatcggcggcggaggctcagggtggggagcaggcctacctggcaggcctggcagggcagtaccacttggagcggtacccggacagttacgagtccatgtccgagccgcccattgctcatcttttgcgccccgtgcttccccgggccttcgccttccccgtggacccccaggtccagtctgccgctgatgagactgctgtgcagctgagcgagttgctgacgctgcccgtgctcatgaagcgctccatcacggcaccgctggccgcccacatctccttggtgaacaaggccgctgtcgactacttcttcgtggagctgcacctggaggcgcactatgaggcactgcggcacttcctgctgatggaggacggcgagttcgcccagtccctcagcgacctgctctttgagaaggtggcctccggacacgggcttggagctgggcaaacgcccggagagctgctcaacccgctggtgctgaactctgtgctgagcaaggccctgcagtgcagcctgcatggggacaccccgcacgcctccaacctctccctcgctctcaagtacctgcccgaggtgtttgcccccaacgccccggatgtgctgagctgcctggagctcaggtacaaggtggactggcctctcaacattgtcatcaccgagggctgcctgagcaagtacagcggcgtcttctccttcctgctgcagctgaagctcatgatgtgggcgctcaaggacgtctgcttccacctcaagcgcacagccctgctgagccacatggccggctctgtgcagttccgtcagctgcagctgttcaagcacgagatgcagcatttcgtgaaggtcatccagggctacatcgccaaccagatcctgcacgtcacctggtgcgagttcagggccaggttggccaccgtgggcgacctggaggagatccagcgtgcgcacgcagagtacctgcacaaggccgtcttcaggggcctgctcacggagaaggcggcgcccgtcatgaacgtcatccacagcatcttcagcctcgtgctcaagttccgcagccagctcatctcccaggcctgggggccccctgggggcccgcggggtgcagagcaccccaactttgcactcatgcagcagtcctacaacaccttcaagtactactcccactttctcttcaaagtggtgaccaagctggtgaaccgcggctaccagccccacctggaggactttctgctgcgcatcaacttcaacaactactaccaggacgcctgaggctgctctgcgggggacgtgcacaataaaggtgttctcggaaaaaaaaaaaa

SEQ ID NO: 81 - DNA, 965 bp, Homo sapiens
  CDS (689)..(883)
ctcagcaccatttaatgtattaaaaaacagctttaaaaacaaaacaaaacaaaaaaaacttgaaataggaacttcaccgtctcttaagagcgatatatttaatacattcacaagattcgaaatgaaaaacaaacattattcatgctacaggtttttaattttccttggacaacaccaaaaacacagtactcaaacggcatgttttttttttgtttttttggtttctttttgagatggaatttcactcttgttgcccaggctggtcttgaactctgggctcaagcgatcctcctgcctcagcctccctaagtgctgggattacaagcatgagccaccacactcagccttcaaaggtatttatcatctatgtccattatactatataatagttatttgtgtcttcctccattacattataattttgacttcctgtaattcacctttgattcttcagcacttaatagtctgcctgggactaagtgctcaataaattctgaactcaaatcactaacagcaaaagaaaaattaatgaccagctatttaagacagatatataggatgaaatttctcattacattatttatgcattccccttaattgtgtgcctaacacgtttaactgccttattttatttttttacaaacagggtctcactttgtcacccaccctgaggtgcagtggtgtaactatggctcactgcagcctcaacctcccaggctcggatgatcctcctgcctcagcctcccaagtagctaggacaacaggtgcacgccaccatgcccagctaatttttgtattttttgtagagatggggtttcactatatttcccaggctggtcttgaactctgggctcaagcgatcctcctgcctcagcctccctaagtgctgggattacaggtgtggggccaccgcaccttgacctgccttatttttttagatcgaaaagcagagcagctttaaagag

SEQ ID NO: 82 - DNA, 593 bp, Homo sapiens
  CDS (12)..(434)
  misc_feature (1)...(593): n = a,t,c or g
cgggactccaaatgggtcgcagtcgcagccgctctccacggagggaacgtaggcgttcccggtccacatcccgggagagagaacgcaggcgccgagaaaggtccaggtctcgggagagagatcggagaaggagccgctcgcgatccccgcaccgaagacgctcccgatctccaagacgacatagatccacatctccttccccttctcgactgaaagaaagaagagatgaggaaaagaaagaaacaaaagaaacaaagagcaaagaacggcagattactgaggaagacttagagggcaaaacagaggaagaaatagaaatgatgaagttaatgggatttgcctcctttgactccacaaaaggtaagaaggtggatggctctgtaaatgcctatgccataaatgtctctcagaagaggaagtacaggtatgcatagcccccattattatgtttgaactaataaatcagttttttacttcaaactttattatgagataatcatgtttgtaggaaatgtagcagttttccatactgttccttgtttggaatggaaatattncatttgcttatattcctgggtgtgttcaaaattgtt

SEQ ID NO: 83 - DNA, 533 bp, Homo sapiens
  CDS (411)..(506)
tactactactactaaattcgcggccggtcgacaaaacataagaaaataagagagttggaaagaaatctggtaaaacttatgcaaataaaaaatacagtcattaaatttttaagaaatcagtgaatgggttaaaggaggaatgtgaatggaagctaaaggagaaataagtgagtggaagaaatatgtgaagaaattacccagaatgcaggaaagagagaggaaaaaaagaaaaaacaggaaatcttgagagacacagatgttgaaatgggaaggtctaacttaatgtctaatggaagttgacaagagaaaaagcaatatggagatgaagcaatatttgaagagagaatggctgaaaatactgaagaattaatgaagggtagaagtccttagatttagaaagcctaggccagatgtggtggctcatgcctataatcccagcacttttggaggccgaggcgagaggattgcttgaggccaggaatttgagacaagcctgggcaacatagcgagacctcatctctataaaaaaaaaa

SEQ ID NO: 84 - DNA, 1913 bp, Homo sapiens
  CDS (70)..(1758)
cttatctttctgaagcacagagaagcggttatacgcagaagtttgggagaactgggtaaggccgcacacatggaaattgccagtttcgtgggtcccaacgtcaatactgtgggcaaccttagaccggctcaaagcgcagctggggacggtgatgaagtgcagagcgtccacagccagcgacaagactgccaagcaactggcagcctgagtaacggagaaaacaacgaaaaaaacgcattcaccacctaccaacaagaaacaaaaaacacgaccaccccacagtcagtctactttttaggcgtgaataagatgagcagccagcaccgcgaaggctcacggggaacgtccccgccccttccggttcttgcctgctttgagctggctgtcgcgagagttggtccgcggacgccggaagtagttcgtcgctccctagcggccgaaggggcgggctcgcggggtctcgactgctttcggcttgctcggcggagcaagatggcggacatctccctggacgaactcatcaggaagcgcggggcggcggcgaaaggacggcttaatgccagaccgggagttggaggtgtccgatctcgagttgggatccagcaaggccttctcagccagtcaacacgcacagccaccttccagcagagatttgatgcccggcagaagattggcctctcagatgcccggctcaaactgggagtcaaggatgcccgggagaagcttttgcagaaagatgcccgatttcgaatcaaagggaaagtgcaggatgccagagagatgttgaactctcgcaagcagcagaccacggtgccccagaagccccgccaggttgctgatgcccgggagaagatcagcttgaagaggagttcccctgctgccttcataaacccacccattgggacagtgacccctgctctgaagctcaccaaaaccatccaggttccacagcagaaagccatggcaccacttcatccccatcctgccggaatgagaatcaatgttgtcaataaccaccaggccaaacagaatttatatgacctggatgaagatgatgatggtatagcttccgttcctactaaacagatgaagtttgcagcctcaggcggctttctccaccacatggctgggctaagcagttccaagctttccatgtccaaggccctccctctcaccaaagtggttcagaatgatgcatacacagctcctgctctcccttcctctattcgaacaaaagccttgaccaacatgtcccggacactggtgaacaaggaagaaccccccaaagagctgccagctgctgagcctgttctcagcccattggaaggcaccaagatgactgtgaataatctgcaccctcgagtcactgaggaggacattgttgagcttttctgtgtgtgtggggccctcaagcgagctcgactggtccatcctggggtagcggaggtggtgtttgtgaaaaaggacgatgccatcaccgcatataagaagtacaacaaccggtgtctggacgggcagccgatgaagtgcaaccttcacatgaatgggaatgttatcacctcagaccagcccatcctgctgcggctgagtgacagcccatcaatgaaaaaggagagcgagctgcctcgcagggtgaactctgcctcctcctccaacccccctgctgaagtggaccctgacaccatcctgaaggcactcttcaagtcctcaggggcctctgtgaccacgcagcccacagaattcaaaatcaagctttgagcaggggagtgaggcagccagaagtgggggcagaggagggtggctctgtttccccaaggcaaagcttatgaccaatgggccatcggactggagacccctgattgtgggaagggttgccagggataaagagcttcctcactggaaaaaaaaaaaaa

SEQ ID NO: 85 - DNA, 666 bp, Homo sapiens
  CDS (478)..(624)
aaaacagtgtagtctttgtgactgaatggtgtgtatgctttcactgttgtttttggatatggaacaacttttatctccagtgtaatggctccatggctgggaaggcagcgacaatgacagcacacagcactgttgggttttcttttactctattttcctaacaacttagtgtttggattttaccctttagaagttggattcaagcttccttcttgaggtagcccctaagtgtcatgggctcaaacacccactaccaaaagagtctgctcttttcatggtagcttttggcagacctggaaggagattgtgtcacatggcctgtaaacaaaaccagtaattcactgggtgaagaccaaatgcctcatcaactgccaagcctctgtctgtctcccttagatcagtagcccatgatccctttacgaacctcagcctcggctctgcttttattgtttttcactgcatagcgctgcctttgctatgtcctttagttcaccatctatgaattggcaagaaaaattttcctgccaggcacagtggctcactcctgtgctcccagcactttgggaggctgaagtgggagcattgcttgagcccagaagtttgagaccagcctgggcaacatagagagaccccatctctacacaaaatttaaacaaaaaaaaaaaa

SEQ ID NO: 86 - DNA, 1157 bp, Homo sapiens
  CDS (258)..(911)
cacgcgtccggaacacagtacttggcacaatgccaaattgaatgaggagggaagaaggagagggaagcacacattgacattaagagtaaaagaattgttcttaccatgttatatactttaatatatggaatcgcctgaatacaggtctccatacaaaactctaagaaacttctaaggaatcccttacctataaagctcttttggaaagaatgaggttttaattttcttctaacatcaacaaaccctcacaaatattcatgttgcagaccaaacctggaccacccaaaaagccgaagaccccttcaagaccatcagccttagcatattgctatcactgcgcgcaaaaaggccattatggacacgaatgtccagaaagagaagtgtatgacccgtctccagtatctccattcatctgctactatgatgacaaatatgaaattcaggagagagaaaagagactaaaacaaaaaataaaagtactcaagaaaaatggggttatcccagagccatccaagctaccttatataaaagcagcaaatgagaacccccaccatgatataaggaagggccgtgcctcatggaaaagcaacaggtggcctcaagaaaataaagaaacacaaaaagaaatgaagaacaagaatagaaactgggagaagcacaggaaggctgacagacatcgtgaagtggatgaggattttcccaggggccccaaaacctactcttctcctggcagttttaaaacccagaagccttctaagccctttcaccgttcatcacattaccacacgtcaagagaagacaagtctcccaaggaaggcaagaggggcaagcagaagaaaaaggagaggtgctgggaagatgatgacaatgataacttatttcttattaagcagagaaaaaaaaagtcttaagccgtcaggcagcctctgatgtggcttttcattgttcatttggcctttgtgtctataaccttctggcactgtgtttattatctatgattaaataaagtgagtttttggttttgtttttttaatttcagccattcctagagttactgaatatccatggagatctcaattctctgtgtccaacaggatattaggtaagaaagtacaaagataaacctggacttctcctattccaatatgtcatcttta

SEQ ID NO: 87 - DNA, 964 bp, Homo sapiens
  CDS (10)..(816)
ctgatttgcatggatggactctccccctctcagagtatgaagagagggagagatctgggggaagctcagcttcagctgtgggtagagaagacaggactcaggacaatctccagcatggccagcttccctctcctcctcaccctcctcactcactgtgcagggtcctgggcccagtctgtgctgactcagccaccctcagcgtctgggacccccgggcagagggtcaccatctcttgttctggaagccgctccaacgtcggaagtaataatgttaactggtaccagcagctcccaggaacggcccccaaactcctcatctatagtaataatcagcggccctcaggggtccctgaccgattctctggctccaagtctggcacctcagcctccctggccatcagtgggctccagtctgaggatgaggctgattattactgtgcaacatgggatgacagtactgtggtcttcggcggagggaccaagctgaccgtccctggtcagcccaaggctgccccctcggtcactctgttcccgccctcctctgaggagcttcaagccaacaaggccacactggtgtgtctcataagtgacttctacccgggagccgtgacagtggcctggaaggcagatagcagccccgtcaaggcgggagtggagaccaccacaccctccaaacaaagcaacaacaagtacgcggccagcagctatctgagcctgacgcctgagcagtggaagtcccacagaagctacagctgccaggtcacgcatgaagggagcaccgtggagaagacagtggcccctacagaatgttcataggttctcaaccctcaccccccaccacgggagactagagctgcaggatcccaggggaggggtctctcctcccaccccaaggcatcaagcccttctccctgcactcaataaaccctcaataaatattctcattgtcaatcaaaaaaaaaaa

SEQ ID NO: 88 - DNA, 755 bp, Homo sapiens
  CDS (259)..(672)
tctcactgagaaatcaaggggcagaatcaatatcgttaccgttcactgaacagccattttcaaatggacaagatggagataggctcctgagtattttgaaaaacaatagaaagagcccctcacagtccagccttctaggtaacaaatttaaaaacaaaatatttgaaaaaaaaattagaaactgcgcaaccacaggaaaaccgcctggcaaagattcaaagtgtaggcaaaaacctgcagagagtgaacagagtcctcatgggcccaaggagcatccaggaaaggcacttcaaaaaggtgggaaagcacagcactaggaaagaacaggatgcccaggcatttgtggacaatgctgccaaaggaaaaaggcttgagggtccagccccaagggagctggaacagcctcacatagtgcaggggcctgagaaggtagtgggaaacaccatctacaccaagccttcattcacccaagagcataaggcagcagtctcctctgtgctgaaacccttctccatgggcgtgccttctgcctctagccctgcaaaagccctacctcaggtcagagacagatcgaaagacttagcctacaccattttaattttagaaatggcaatggctagagtgaaaaacatgaaggctgctaaaccaatcacacattccagaaaaaaatagcgcttttataaaactcactccattgtggcccacagaacacccaaggccaaaaagattagaaagtttagaaagggcagtgtatt

SEQ ID NO: 89 - DNA, 5599 bp, Homo sapiens
  CDS (314)..(4159)
tcagccattactttgctcggcgctgctcccaggcatctccgaccctcggtgctgtggggagccccacacttgggctcctcgcctctcgccctcgctccccgtccctcctcccctctctccgccccttcccccttttctttctcctctctttcttcccctctctcccttctttcggccgccgtctcccccgcgccctcctcggggcggagggaagccgtgaagggggagggagggctcggtgtcaatttttttttgtgtggctgcggccgtagcctgtggcgggcaagcggggagaccccggcgcagcagaaccatggatggcccgacgcggggccatggactccgcaaaaagcggcggtcgcggtcgcagcgagaccgggagaggcgctcccggggcgggctgggggccggcgcggccggcggcggcggggctggccggacccgggcgctctcactcgcctcgtcgtcgggctccgacaaggaagacaatgggaagcccccgtcctccgccccgtcccggcccagacccccgcggaggaagcggagagagtccacctcggcagaagaggacatcattgatggatttgccatgaccagctttgtcacttttgaagcgctggagaaagatgtagcacttaagcctcaggaacgtgtggagaaacgccagacgcccctgaccaagaagaaacgagaagcacttaccaatggcttgtcctttcattcaaagaagagcagactcagccacccacaccactacagctcagatcgagaaaatgaccgcaatctctgccagcaccttgggaagagaaagaaaatgccgaaggcactcagacagctcaagccaggacagaacagctgcagggacagtgacagtgaaagtgccagtggagaatccaagggcttccaccggagcagctctcgggaaaggctcagtgatagttcagctccttccagcttgggaacaggctacttctgtgacagtgacagtgaccaggaagagaaggcatcagatgccagctctgaaaaactcttcaacactgttattgtaaacaaagatccggagttaggtgttggcacgctaccagaacatgacagccaggatgcagggccgattgtccccaagatatcgggtctagagagaagccaggagaagagccaggactgttgcaaagagccaatctttgagcctgtggtgcttaaagacccctgccctcaggtcgcacagccaataccccagccgcagacggagccccaactccgagctccttctccggaccctgacttggtgcagcgcacagaggccccacctcaacccccacctctgagtacacagccaccacagggccctcctgaggcccagctccagcctgccccgcagcctcaggtgcagaggccacccaggccacagtcccccacccagctgctccatcagaacctcccacctgtgcaggcccacccctctgctcagagcctctcccagccattgtcagcctacaacagcagtagcttaagcctcaacagtttaagcagcagcagaagcagcactccagcgaagactcagcccgccccacctcacatctcccaccacccctctgcctccccgttccccctctccctgcccaaccacagccccctgcacagcttcacacccaccctccagccccccgcacactcacatcaccccaatatgtttgcccctcccactgctctgcctcctccaccaccactgacatcaggaagtctgcaggtggccggacacccggccgggagcacttactcagagcaagacatcttgcgacaggaactgaacactcgttttttggcctctcagagtgctgaccgcggggcttccctgggccctccgccctacctgcggaccgagttccatcagcaccagcaccagcaccagcacacccaccagcacacgcaccagcacaccttcacgccgttcccccacgccatcccacccaccgccatcatgccgacgccagcacctcccatgtttgacaaataccctacaaaagttgacccattctaccggcacagtctcttccattcctatcctcctgcagtgtcgggcatcccccctatgatcccacccactggcccttttggttcactacaaggagcatttcagccgaagacatccaaccctatcgatgtcgctgctcggcctgggacagtcccacacactttactccaaaaggacccgaggttgacagatcctttcagacctatgttaaggaaaccagggaagtggtgtgctatgcatgttcacatcgcctggcagatttaccaccaccaacagaaagtcaagaaacagatgcagtcagacccacataagctggactttggactgaaacctgagttcctgagccgccctccaggccccagtctttttggagccatccaccacccccatgacctggcacggccttcaactttgttctctgccgctggtgctgcacacccaactgggaccccttttgggccacctcctcatcacagcaacttcctcaaccctgctgcccacctagagccttttaatcggccgtctacattcacaggcctagcagcagttggtggcaatgccttcgggggacttggaaatccttccgttacacccaactcaatgttcggccacaaggatggccccagtgtgcagaactttagcaaccctcacgaaccctggaaccggctgcaccgaacgcctccgtcgttcccgacccctccgccctggctgaagccaggggagctggagcgcagcgcgtccgctgcagctcatgacagagatagagatgtagataaacgagactcatctgttagtaaagatgacaaagaaagggaaagcgtcgagaagagacactccagccacccttcaccagcacctgtcctcccggtgaatgccctgggacatacccgcagctccactgaacagatccgggctcatctgaacactgaggctcgggagaaggacaaacccaaagagagggagagagaccactcggaatcccgcaaggacctggccgccgacgagcacaaggcgaaagagggccacctgcccgagaaggacgggcacggccacgaggggcgcgccgcgggcgaagaggccaagcagctggcccgggtgccgtctccctacgtgcggaccccggtggtggagagtgccaggcccaacagcacctcgagcccgggagggccgagcccgcgcaagggtgagccggcctacgagaaccccaagaagagctccgaggtcaaggtgaaggaggagcggaaggaagaccatgacctgcctccagaggccccgcagacccaccgggcctcggagccgccgcctcccaactcctcgtccagcgtgcacccggggcccctggcctcgatgcccatgacggtgggggtgacgggcattcaccccatgaacagcatcagcagcctggacaggactcgcatgatgacccccttcatgggcatcagccccctcccgggcggagagcgcttcccgtacccttctttccactgggaccccatccgggaccccttgagggatccttaccgagaacttgacattcaccggagagacccgctgggcagggacttcctgctaaggaacgacccgctccaccggctctcgactccccggctgtacgaagccgaccgctccttcagggaccgggagcctcacgactacagccaccaccaccaccaccaccaccacccgctgtctgtggaccctcggcgggagcacgagcggggaggccacctggacgagcgggagcgcttgcacatgctcagagaagactacgagcacacgcggctccactccgtgcaccccgcctccctcgacggacacctcccccaccccagcctcatcaccccgggactccccagcatgcactatccccgcatcagccccaccgcgggcaaccagaacggactcctcaacaagacccctccgacagcagcgctgagcgcacctcccccgctcatctccacgctggggggccgcccggtctctcccagaaggacgactcctctgtccgcagagataaggggagaggcccccttcccacacgctgaaggatatcgaggcccgataagccgagaacaggagcaagaacgaggaagaagaaaccctaggcagacaccaggccaggcttgagagacagaactcctgcatggctcacacagactgggggggaaagccccaccccttccccttgtaaaaaatgtatagactcagtgcacattttgaaatgttttgtatattatatgttgagatttttcagatcttttagcccagtcatatgttctcacgtctcctactttttgtttctcgtataaaactttttgatttgaaccaaaacagtgaagatgacaacacacaccaattggatgataattgtagcgggggcggtgggggggagaagtccacgccatccatcatgcaaaattctttcagatgaggtgggaaggccgtgtacatagttatgtaaaaagagattgcttcatgagctaatggttcatatatgcaaaagggtaagatgaaagctttactttgtacaaatgtaaatagataaagtaacataatacattaatacttcttaaaatgtgctatttgcaaacttacttaatatcagtgaacacagtcggctaaagctgtgttcccatatattgttatagacagctaaacccttcaactatgcaatgaatgttcgggcttttcacaaaagcccgcctaactcaaaggagccttttcaaatccatttacagcatacttaaggtcatattttccctgaacaagcgcttacgtgatatgactctgttttccttgcttgttttttttcaaacggagaaacatcctgttttgcaaattggaccccaggctggaacttagcatctgaagttgccgcttgtgggctctgggggaaagtgtagccccggagaggtaactgaggacatgagcaaccagtgccagggagggtgggatttgccagatgccaaaatcaggggacgggtggtggtgtctgtcagacacacacaggtcgccagtgacttcacacacacctcatgtgagaaccatgccttttttagtgtgtcctatttcatacctgtacacacttcctcgttttgtaatgagatttacttacacccaaacagatcctgaaagaaagcttcaagttttctcagatgatggatatgttttcactgtattcaataactgacggatgtaaggtgcacgtttcctgatgtgacgcactgtattccagctggtgatcaagtctgggaacagccgtaacaggtcaaccttgtggagccatcgcgagttagagggtgaaagatggcagaaaaaaaagtcttgtgtgtgagtgtgttttttgagtttgcatcaatcttaatgtctcttcataatacttttataatacattaagcctcttgtctacatatttggagagaatatgactttactagcagagaaatacaatatatcttgtctactggactgtaaaatatatgtatgaaataaaattagttccatttggtcttctagtatattaaagtgctatctgacgttgttatcctgtttttgcaaaaaaaaaaa

SEQ ID NO: 90 - DNA, 834 bp, Homo sapiens
  CDS (317)..(718)
acacatgagacatctctccacccccatcctgctcaccgaagcgctcaatgactactttccaccaacactgcactatacccccctgtgtgccccctttcatattctgatttgcaggctactggtccaccctgctggggtggtctttgttttttggggttttgtctcccttcacagttgacacaatccagaggacaggaagcatttctcttttctctcaatagcaccatccaactggctgaccagccataggtctccaagttcaggaaactggggtttggaaagaaatgctgagcatctcgaggggttggctatctagatgcagagtatactaggagtctccttccatcgtaaggcattcagctgctctcttgggagtccccattctcctacctcagtctgtcccctgggaggagtgactcaggggctgatactcactagaccctccaagagacatggcagctgtgggaatattaggtcaccccattctaccacccaggaccaagaaaacataggagagtgtgctgaagacacaataccctttgaagtttccaaaggggagcctcaaccaaaagacaatctgataagatctctgtttttaggccaggtggggtatctcatgcctgtaatcccagcactttgggagaccaaggcgggtggatcacgaggtcaggagatagagagcatcctggctaacatggtgaaatcctgtctctactaaaaggctcctgtagtcccagctactcaggaggctgaggcaggagaatggcatgaacccgaaaggaagagcttgcagtgagccgaggtcgcggacgcgtgggtcgacccgggaattcc

SEQ ID NO: 91 - DNA, 3185 bp, Homo sapiens
  CDS (623)..(3013)
gagagaagatagaatggctcttgacaatttattggcaaacctacccccggccaagccaggaaaaagtagcagtttagaaatgactccctacaatacacctcagctatctccagcaaccactccagcaaataaaaagaatcgattacctatagcaactcggagcagaagccgcaccaatatgctaatggacctacatatggaccatgaaggatcatctcaagaaaccatccaggaggtgcaaccagaagaggtgttggtcatttccttaggtacaggtccccagcttactccagggatgatgtcagaaaatgaggtcctaaacatgcagctttcggatggaggacaaggagatgtccctgttgatgaaaacaaactccatggtaaacctgataaaaccttgcgcttttccctctgcagtgataatctggaaggaatatctgaaggtccttcaaatcgctccaattcagtgtcctccctagacctagaaggagagtctgtgtcagaacttggagcaggaccttctggcagtaatggagttgaagctctacagctgttagaacatgagcaagctacaacacaggataaccttgatgataagctaaggaagtttgaaattcgtgacatgatgggattaacagatgatagggacatatcagaaacagtgagtgagacctggagtacagacgtcttgggaagtgactttgaccctaatattgatgaagatcgcttgcaagaaattgcaggtgctgcagcagagaacatgttaggcagtttgctgtgcctcccaggttcagggtcagtgcttcttgacccctgcactggttctaccatatcagagacaacaagtgaagcttggagtgtagaggtattgccaagtgactcagaggccccagacctaaagcaggaggagcgtctgcaagaactggagagctgttctggactgggtagcacatctgatgatacggatgtcagggaggtcagttcccgccccagcacaccaggcctcagtgttgtgtccggcataagtgcaacctctgaggatattcccaataagattgaagacctgagatctgagtgcagctctgattttgggggtaaagattctgtcactagtccagacatggatgaaataactcacggtgcccaccagctgacctctcctccttctcagtcagagtctctgctggccatgtttgatccactgtcttcacatgaaggggcttctgctgtggtaaggccaaaggttcactatgctaggccatcgcatccaccaccagatcccccaatcctggaaggagctgtgggaggaaatgaggccaggttgccaaactttggttcccatgttttaactccagctgaaatggaggcattcaagcaaaggcattcttaccctgagagactagttcgaagcaggagctctgatatagtatcttctgtccggagacccatgagtgaccccagctggaaccggcgtccaggaaatgaagagcgagaactccctccagctgcagccattggtgctacttctttggtggctgcacctcattcatcatcttcatccccgagtaaggactcctcaagaggagagactgaagaacgcaaagatagcgatgatgagaaatcagacaggaacagaccttggtggagaaaacgttttgtttcagccatgcctaaagatgatcccagccctagactcagtgcacaagctcaggtggctgaggatattctggacaaatacaggaatgccattaaacggaccagccccagtgatggagcaatggcaaactatgaaagtacagaggttatgggtgatggtgaaagtgcacatgattctccccgtgacgaagcactgcagaacatctcggctgatgatctcccagactctgcaagccaagcagcccacccgcaggattcagctttctcttacagagatgcaaaaaagaaactgaggcttgctctttgctctgcggactctgttgccttcccagtgctgacccattcaacaaggaatggtttaccagaccacacagacccagaagacaatgaaattgtatgcttcttaaaagttcaaatagctgaagcaattaatttacaagataagaatctaatggctcaacttcaagaaacaatgcgctgtgtgtgccgttttgataataggacttgtaggaaactgctggcttcgattgctgaggactacagaaaaagagccccatatattgcttatctcactcgttgtcgacaaggactacagaccacacaggctcacctggaaaggctattgcaaagagttttgcgggacaaagaagtggccaatcgatactttaccactgtctgtgtgagattactgcttgagagcaaagaaaagaagatcagggaattcattcaagactttcagaaactcaccgcagctgacgataaaactgctcaggtagaagattttctgcagtttctttatggtgcaatggcccaggatgtcatatggcaaaacgcgagtgaagaacagcttcaagatgcacagctggccattgagcgaagcgtgatgaaccggattttcaagctcgccttctaccctaatcaagatggggacatacttcgcgaccaggttcttcatgaacatatccagagattgtctaaagtagtgactgcaaatcacagagctcttcagataccagaggtttatcttcgagaagcaccatggccatctgcacaatcagaaatcaggacaataagtgcttataaaaccccccgggacaaagtgcagtgcatcctgagaatgtgctctacgattatgaacctcctgagcctggccaatgaggactctgtccctggagcggatgactttgttcctgtgttggtgtttgtgttgataaaggcaaatccaccctgtttgctgtctactgtgcagtatatcagtagcttttatgctagctgtctgtctggagaggagtcctattggtggatgcagttcacagcagcagtagaattcattaaaaccatcgatgaccgaaagtgaccaagaccaaggcccaccaaggcagcagactgttaatcagacaaacagatctctgagaaggtgcatcagctgctttgaaggctgaagattgttttgtatgatactgcacagcatcaggcattttaaagcagatctttactaaacaggttaatgagctaacaaaaaaaaaaaa

SEQ ID NO: 92 - DNA, 1607 bp, Homo sapiens
  CDS (148)..(1152)
  misc_feature (1)...(1607): n = a,t,c or g
ctcgcgaatgttaggcctgtgggtgccatagcgaccgggaggttgggctggccagattcagctgccgggaccggaccaggtgcttaggagaacatgcagtagaacttttcatcaaacaaatggaacacgtcacagaattttgctaacatggacaactctgcacagaaaaatgaacgcactggcaaacatcccagacgtgccagtgaagtacagaaaggttttactgctgcatatccaacacaatcctccattccttttaaatctcaagcttcagtaatcccagaatcagaaaaaaaaggattcaatagtcaagccaagagatttcctcataagaagaatgatatcccaggacctgggttctacaatgttattcaccagtcaccggtgtccaacagtgtctcattgtccaagaaaggaacttgcatgtttccctcaatgtgcgcccgattggacaccatcatttctaaataccctgcagcgaatgcatacactatcccatcggattttatttccaagagagactttagtaattcgtgttccagcatgttccagttgccaagctttatgaaagctctcaagtttgaaactcctgcaccaaactattacaatgcctctgtctcttgctgcaagcagagaaacaacgtctgtactcgagccgggtttatgtcaaaaacccaaagaggatctttcgcttttgctgataaaggacctcccccagggcattatgatatcaacgaatcccttgtgaagcagtcgccaaatacattaatgtcttgttttaaatcaaaaaccaaccgtggattaaaactgacgtcaacaggcccgggacctggttattacaaccccagtgattgcacaaaagttccaaaaaagactcttttcccgaaaaaccccatcctgaacttctctgctcagccttcgcctctgcctccgaagccacctttcccaggtcctggtcagtatgagatcgtggactacttaggcccccgcaagcatttcatctctagtgcatcattcgtgtccaataccagccggtggacagcggcgccgcctcagccaggcctgcctggcccagctacgtacaagccagagcttccaggaaagcagtccttcctctacaacgaggacaagaaatggatcccggttctgtagggatgtcacacaaggtcaaggagaactccagccaccagcccaccctgcccagcgtccccaggacattcctcaggaggagaccgatcatgagtgtggcagctgaacttggggggtggctctaccactctggcctggcatcctagccggactgctgccattgcctttgtcttgagctggagacattgctccctggagacttcaccccagccccacagactccagtggcttcntgagcagaagggaggagtggacagagccccctggctgcttccccacgcacccatccaggctgccttccggcacgactccctgccgcagactgaagggactcctgaagcgcagacttcaaggaggatcagtccaccctgaaggtggccaagcctggaagccccacccttccctgtttcattccttcattcatttacacattcattcattccctcaaaaaaaaaaaa

SEQ ID NO: 93 - DNA, 1316 bp, Homo sapiens
  CDS (107)..(1078)
gggctgcctgtgacgcgcggcgcggtcggtcctgcctgtaacggcggcggcggctgctgctccagacacctgcggcggcggcggcgaccccgcggcgggcgcggagatgtggcccctggtagcggcgctgttgctgggctcggcgtgctgcggatcagctcagctactatttaataaaacaaaatctgtagaattcacgttttgtaatgacactgtcgtcattccatgctttgttactaatatggaggcacaaaacactactgaagtatacgtaaagtggaaatttaaaggaagagatatttacacctttgatggagctctaaacaagtccactgtccccactgactttagtagtgcaaaaattgaagtctcacaattactaaaaggagatgcctctttgaagatggataagagtgatgctgtctcacacacaggaaactacacttgtgaagtaacagaattaaccagagaaggtgaaacgatcatcgagctaaaatatcgtgttgtttcatggttttctccaaatgaaaatattcttattgttattttcccaatttttgctatactcctgttctggggacagtttggtattaaaacacttaaatatagatccggtggtatggatgagaaaacaattgctttacttgttgctggactagtgatcactgtcattgtcattgttggagccattcttttcgtcccaggtgaatattcattaaagaatgctactggccttggtttaattgtgacttctacagggatattaatattacttcactactatgtgtttagtacagcgattggattaacctccttcgtcattgccatattggttattcaggtgatagcctatatcctcgctgtggttggactgagtctctgtattgcggcgtgtataccaatgcatggccctcttctgatttcaggtttgagtatcttagctctagcacaattacttggactagtttatatgaaatttgtggcttccaatcagaagactatacaacctcctaggaaagctgtagaggaaccccttaatgcattcaaagaatcaaaaggaatgatgaatgatgaataactgaagtgaagtgatggactccgatttggagagtagtaagacgtgaaaggaatacacttgtgtttaagcaccatggccttgatgattcactgttggggagaagaaacaagaaaagtaactggttgtcacctatgagacccttacgtgattgttagttaagtttttattcaaagcagctgtaatttagttaataaaataattatgatctatgttgtttgcccaattgaaaaaaaaaaaa

SEQ ID NO: 94 - DNA, 4415 bp, Homo sapiens
  CDS (97)..(2109)
gcacgagcggcggcggcggcggcagtggcggtcccactggcaggcgggcaagaggggagtccgggcggcggccggcgtgggagccgggggaccaccatggtaaagaagcggaaaggccgcgtcgtgatcgactcggacacagaggacagcggcagcgacgagaacctggatcaggagctcttgtccctggcaaagcgaaagcgcagtgactctgaggagaaggagccgcctgtgagtcagcctgcagcctcgtcagactcggagacgtctgacagtgacgatgagtggacatttgggagcaataaaaataagaagaaaggaaaagccagaaaaatagagaagaaaggaaccatgaagaaacaggccaacaaaactgcctcctcaggcagttcagacaaagacagttcagctgagagctcagcccctgaggaaggtgaagtgtcagactctgacagcaacagctcctcttccagttcagattcagactcttcctcagaagatgaagagttccatgatggctatggagaagacctcatgggagatgaggaagacagggcccgtctggaacagatgacagagaaagagagagagcaagaactgttcaatcgcatagagaagagggaggtgttgaaaagaagatttgaaatcaagaaaaaactaaaaacagccaaaaagaaagaaaagaaagaaaagaagaaaaagcaagaagaggagcaagaaaagaaaaaactgacacagattcaagaatctcaggtaacatcccacaacaaggaacggcgttccaagcgggatgagaaactagacaagaaatctcaagccatggaggagctaaaagcagagcgagaaaaacgaaagaacagaacagctgagctccttgccaaaaaacagccattaaaaaccagtgaggtctactctgatgatgaagaggaggaagaggatgacaaatccagtgaaaagtcagaccgctcatcacgaacatcatcgtctgatgaagaagaggagaaagaagagatccctcccaaatcccaaccagtttccttacctgaagaattgaatcgggttcgattatcacggcataagctagaacgctggtgtcacatgcccttctttgctaaaactgtcacaggatgttttgtgcggattggcatcggaaaccacaacagcaaaccagtttaccgggtcgctgagattacgggtgttgtggaaactgccaaagtttaccaactaggtggcaccagaacaaacaaagggctgcaactacggcatggcaatgaccaacgcgtgttccgtttagagtttgtctcaaaccaagaattcaccgaaagtgagtttatgaagtggaaagaagcgatgttctctgctggcatgcagttgcccactctagatgaaatcaataaaaaggaattatctattaaagaagctcttaattataaattcaatgatcaggacattgaagagattgtaaaagagaaagaaaggttcagaaaagctccacccaactacgctatgaagaagactcagctactgaaggaaaaggccatggctgaggacctgggggatcaggacaaggccaaacaaatccaagatcaactgaatgagctggaggaacgggcagaggccctggaccgccagcggaccaagaacatatccgctatcagttacatcaaccagcggaaccgggagtggaacattgtagagtctgagaaggcccttgtggctgaaagtcacaacatgaaaaaccaacagatggatccctttactcggcggcagtgcaagcctaccatcgtttctaattccagagacccagctgttcaagctgccatcttggcccagctgaatgcaaaatacggttctggagtgttaccagatgctccaaaggaaatgagcaagggtcaaggcaaagataaagatttgaattctaagtcagccagtgacctctcagaagatctgttcaaagtacacgattttgatgtgaagattgacttacaagttcccagctcagagtcaaaggctttagccatcacctccaaggctccgccagccaaggatggggctccaaggagatctctgaacttggaagactacaaaaaacgacgagggcttatttgagcacacccagcctgctgcttctgaccctgcatgccccatcgcagcgtcccacctttcctcctttcctttgatttagcctctttgggctggagcagctgttgaactgggaagagactctaaactgccagtcatctgtaatataaaccatttgctgtatagacctcctttgtctgcacaccatctcccaccagcctcccctcccccagggccccacccagtgtgggcctgggctctcttgggctttatccatgtctttagatttgtgtttgccttttgtttttttaaccgcgcagttcattggccactctgcacgcattcagtattaccatggagctgggaatcttgctggagcccctggggcaatagcagcagcaccaggcggtctcctctacagactgccttggcccacccattgaacattcggcacgtgaccttgtggggggagcggggattgggcacctgcgatcctctttcctctcttcatctttctcttctgcccttctttttggaagaaggggtttcaaaaccagtttagtttccaaaaagtgtacatttgtggggggggggggtctaatttgagagcgagagtgtgtatgtgtgtgtgtgtaagtgtgtggatttttttatcatttttttaaaatgcagtactctttgtatcagtctgtcatgggtctatagctgtttcagatttttttcagctgtacttgagcatctgaaactgcaagaaagaaactcattaaatgtgattcttcttactaaacaggcctgactgctgtagctgtgtaacttccccattcccacctactcttcccatcctttcccaactttggagaaaactccccagtttagccccctgacctgcaggctgtgtcctggcaggtgtgggagggaagcccatggccaggtaccagggagggcagtgaatgtcttgctcttcccatgggtacagcccacagcttcttggctgaacgtagaacttctttttctcacccagtataccagcctcttcctggtgattctgttttgctgctttggcaagaactacattttgtttttaagagaaatttctgaatatgaatgtggagagcaaacacaaaaagatttaggttacgccgggtgcagtagctcacgcctgtaatcccagcactttgggaggcctaggcgggtggatcacctgaggtcaggagttcaagaccaatctgactaacacggtgaaaccccatctctactaaaactacaaaacttagccgggcatggtggtgcgtgcctgtaatcccagctactcggggggctgagacaggagaatcccttgaacctgggaggcggaggttgtggtgagccaagatcgtgccactgcactccagtctgggtgacagagtgagactccgcctcaaaaagatttaggttgcaaatgtttcaagcatgtgcagttttgtgtgtgtgtatacatatatatggtcagcatatatattgtgcagctagggcgaagccagcagaggtgtgtgtatgtctttatgaaatgtttgaaaagagataaactgactgcttgataatcactctcaggtgtaaagctccaagtgtaaataaaagtggcatttaacaaatctttcagaacaaagtacagctgactatatataccaagagctaagctaaaggaacagctgagagctccgatctccacgagagactaatctaaaagctctgctttgtacttcctcaccctgctttcgtacaaggaagggggacgatgggaaatcatggacttgtaagttgtatttaaacataaaaatgaacttggtaacttctgggtttagtagagcctcagtgtcgctttaacttagtttactttttttttatttttaaagcagcaatggatggttttaaaggagtattatgattgtaaaattgctaaatatgactgtaacacagctttgtggtagctgtgacacagttcacttgggcaaaggagtggtgatggactcgttaaaatcatatatacttgaatagtccattgaccgaaactctttatagactattgtgtaaatgtggaatcacagactgttaacattgcctggacttcagcagagtcctggagctgctgggacctctcctatcatgatgaacttggacttttttttttgatttctggttttaaaaaacataaaattatagaatccagataattcgctggagtcattctgatccaccatgtagatctgtatttagtatcatttggatttggagaagtgttgattacattatggctgtgtaataaaatttttattaaaactgcaaaaaaaaaaaaa

SEQ ID NO: 95 - DNA, 1926 bp, Homo sapiens
  CDS (797)..(1573)
gctagggagctccccagagagaacatgaggaggaggctttttaggacaaatagataaaagcaaagataatatttcattggttacagttatacagttacacagttatacagttgccttatttggtctatcccatgaggaagtcctagttactaattacgtttttgttggctgcttctgattggttgagcttaagttctgtgtttctttaacataggcatttacaagaaataccacaaataaagtttcagacatgcttgcaaatcaagcaaggttaaggtcacttaggaggcccaactggctctgtctgctcaaggattcttctggcctcgtctccattttacatgaactgttgcataaataaacacagagtacctgaaacaacggaggtgatcattctgcctaccgagtgttggccaggccaagcttggagtgttgctcttattcttagggagtttatttttaagtaatctcatctgtaaatgggattacaatccacaaactgaccttgtatatgattccattccttctcccagcccagccccacactccaaggttttccctttgcttataaggggtagtcacccttttttatttcgaccttccaaacattctgggagttttcctcctttaggccaactacagcgcagaggagcgctttctcctgctgggtttctccgactggccttccctgcagccggtcctcttcgcccttgtcctcctgtgctacctcctgaccttgacgggcaactcggcgctggtgctgctggcggtgcgcgacccgcgcctgcacacgcccatgtactacttcctctgccacctggccttggtagacgcgggcttcactactagcgtggtgccgccgctgctggccaacctgcgcggaccagcgctctggctgccgcgcagccactgcacggcccagctgtgcgcatcgctggctctgggttcggccgaatgcgtcctcctggcggtgatggctctggaccgcgcggccgcagtgtgccgcccgctgcgctatgcggggctcgtctccccgcgcctatgtcgcacgctggccagcgcctcctggctaagcggcctcaccaactcggttgcgcaaaccgcgctcctggctgagcggccgctgtgcgcgccccgcctgctggaccacttcatctgtgagctgccggcgttgctcaagctggcctgcggaggcgacggagacactaccgagaaccagatgttcgccgcccgcgtggtcatcctgctgctgccgtttgccgtcatcctggcctcctacggtgccgtggcccgagctgtctgttgcatgcggttcagcggaggccggaggagggcggtgggcacgtgtgggtcccacctgacagccgtctgcctgttctacggctcggccatctacacctacctgcagcccgcgcagcgctacaaccaggcacggggcaagttcgtatcgctcttctacaccgtggtcacacctgctctcaacccgctcatctacaccctcaggaataagaaagtgaagggggcagcgaggaggctgctgcggagtctggggagaggccaggctgggcagtgagtagttggggaggggagaaagtattaagccagaacccaaggatggaaataccccttagtgagtcagtttagacttcaggctgttcatttttgtatgataatctgcaagatttgtcctaaggagtccaatgggggatatgttttcctcccgtgaggaaatgtttagttcttgagggaaaatccctaaatcctctatatactcaggtttagggaaggaaaacctacccctcacaactccacgcgcagggaaaatgatggaagtgacgctcgcctttagcttcctccctatctgatggaagaccatggaagacctcttggtctctgcaatcagaagtctcaagttgacaagaaaat

SEQ ID NO: 96 - DNA, 849 bp, Homo sapiens
  CDS (532)..(849)
ccattcttacaggagtaaggtggtatcatattgtgcttttgatttgcatttcccagatcacagctatttaaaacaaaacaaaaacctaaatttaaaggcctggaataaatcttaggcctaccattatcttcctcaaactagttcaagttctttagttcatttctatttcacaaagatgtttaccaacattactgactcaaacagactatggtcaatccagtcattttctcactctgccatctgtcaaaacaagttgatttttgctcactagagaacatattcataatgcagcaaaataaacttgtatgcagcttattttcggaagtttaaattttattactactttttaaacacagggctgcatttgacatgtttacactcattcccagtgatttccagcagtggacagtaaagtcatttagaaatttgactgcaagcaaattattaccatgccaaactattaaaacacattattgactgattgactgacaaggtctctgtcacccaagctgggagcacagcagcacaatcatggctcactgcagccttgacctctcgggttcaggtgatcctcccacctcaacctcccaagtagctaggactataggtgcatgccatcacgtccagctaatttttgtatttttcggagagacagggtttcaccatgttgccccactagtcttggaactcctggactcaagtgatccacctaccttggcctcccagagtggtgggaacaggcatgagccaccacacagggccctaaaacacatttttttaaaacacatttggctatttagtttttattttcaccaaaatggacatgaggaaactatggatcagatataa

SEQ ID NO: 97 - DNA, 1470 bp, Homo sapiens
  CDS (256)..(1470)
actgcactccagcctgtaatttcagctacccttgaggctgaggcaggagaatcactggagcctgggaggtggaagttgcagtgaaccaagatggtgccaacacactccagcttgggcaacagagccagacttcatccttgaggccgttcagttgtaataaacttgcacaggggaggtagttgggaagggccaggagaacttcccctaatataggagacgacaggctcatcgctgggcatcagcatccgcacaacaatggtgccattctctctcggggaggtgatgacggtccctcgcgccggagggcccagggaggaaagagataagcagaaagacaccagggaagaacaccacgcttcggaccaacgccagccacagccactgagaagtcgccgcatccggcggcgccgacacacgtttccagggctcttgagagaccataccctgggagtctcgcgggatctcacttttctcggcggcgcagggaatgagacagatcgcgggaattccacccgcgccgggagatggtctggtgacttcgcggctcctcccacgtctctctgggcagtccgccttgcgcatgcgcaggcggcggtggcaaggctacggttcgcgccagcggccggcgctatggggctgagccgcgtgcgggcggttttctttgacttggacaacactctcatcgacacggccggggcgagcaggagaggcatgttggaggtaataaaactcttacaatcaaaataccattataaagaagaggctgaaatcatctgtgataaagttcaagttaaactcagcaaggaatgttttcatccttacaatacatgcattactgatttaaggacttcacattgggaagaagcaatccaggaaacaaaaggtggtgcagccaatagaaaattggctgaagaatgttatttcctttggaaatctacacgtttacagcatatgacactagcagaagacgtcaaagccatgcttactgaacttcgaaaggaggtccgcctacttctattaacgaatggggacagacagacccagagggagaagattgaggcttgtgcctgtcagtcctattttgacgctgttgttgtaggtggagagcagagagaggagaaaccagcaccgtccatattttattactgctgcaatcttctcggagtacaacctggggactgtgtgatggtcggtgacacattagaaaccgacatccaaggaggcctcaatgcaggattgaaagcaacagtctggatcaataaaaatggaatagtgccactgaagtcctccccagttccgcattacatggtttcttctgtgctagagttacctgctctcttacaaagtatagactgcaaagtcagacctcagcatctggggatgccagtgcccgcatctttggaggagtctgctgtgtacctcattatttctcagccttcccctctgctggtcaggactcgctttctttag

SEQ ID NO: 98 - DNA, 2015 bp, Homo sapiens
  CDS (472)..(1548)
atgtggcaggacaacagggtaatagaggcaagagggtcagcaggaaaacctgtgaacaaatgtctctgcatcataaacaaggtgtttaggaagcccaataacatcactcagggactcccacgtagcagtccggggccactcactgggcaaacacgcgtatcgcagatcaacgtggccgctacaagaggaccccggaagtctcggccctacattaggcgcacacacggaaatgcttctttccgagccctcattggctctgacggcattcattcaacgcagagctttctgagtaatgtagttgaccagcttaccccacgtggtcccatggcggcggccgcgctaaggttccccgttcagggcacagtgacttttgaagacgtggctgtgaaatttacccaggaggaatggaatctccttagtgaggctcagagatgcctgtaccgtgatgtgacgctggagaacctggcacttatgtcctccctgggttgttggtgtggagtggaagatgaggcggcaccttctaagcagagtatttatatacaaagagagactcaggtcaggactcctatggcaggtgtgtctcccaagaaggcccacccctgtgagatgtgtggcccgatcttgggagacattttgcatgtggcagatcatcagggaacacatcacaagcagaaactgcacaggtgtgaggcctgggggaataaattgtatgacagtggaaactttcatcagcaccagaatgagcacattggagagaaaccctacagagggagtgttgaggaggcgttgtttgcgaagaggtgtaagttgcatgtgtcaggggagtcatctgtcttcagtgagagtgggaaagactttttgctcaggtcaggattactccagcaagaggccactcacactgggaagtcaaacagcaaaactgagtgtgtgtctctgtttcatgggggaaaaagccattacagctgtggaggatgcatgaaacattttagcaccaaagatatactcagtcagcacgagagactgctccctacagaagaaccttctgtgtggtgtgaatgtgggaaatcctctagcaaatatgacagcttcagtaatcatcaaggagttcacactagagaaaaaccttatacgtgtgggatatgtgggaaattatttaacagtaagtcccacctccttgtacaccagagaattcacactggagagaagccatatgagtgtgaggtttgtcagaaattttttaggcacaagtaccacctcattgcacaccagagagttcacactggagaaaggccatatgaatgcagtgattgtgggaagtcatttacccacagctctacattccgtgttcataagagagttcacactggtcagaagccttatgagtgcagtgaatgtgggaaatcttttgccgaaagctccagtctcactaaacacaggagagttcacactggagaaaagccttacgggtgcagtgaatgtgaaaaaaaatttaggcaaatctcttcacttcgtcatcatcagagagttcacaaaagaaagggcttatgagtgcagtgagtccagtctcattaaatattggagaatacacacctgagtaagatcctgtgattgcagcaaatgtggaaaatgtttacccaaaggtctgctctccttggatattggagagttcacactagagaagagtccttacaagtaaaataaatttgggcagttttgtagccacacctctgtattccttcaggattatagttaacactgaatgaaggccttactagtgtgacaaatacaggatatttatccagaagtctggctgcataactcacaggagagctgtcatgtgggaggattgctacatgggaggatttgcttgagcctgggaggcagaggttgcagtgagccgagattgcaacactgcagtccagtctggaccacagagtgagaccctgtttcaaaaataaaatatataaatgacatccaataaagtatgcatatttgagctgtaaaaaaaaaaaaaa

SEQ ID NO: 99 - DNA, 949 bp, Homo sapiens
  CDS (115)..(687)
taagcttgcggccgccggctgaatgaagcctgggacgcgggagccgcgccgcgcgcagtgtctgcagtgccggaggtctgggaggctccgggcgaagcctccctgctgcaggttatgatgatgtcagacaatgctaaaggcagagcagctcattcatggaagaaaagagggagtatttcttctctaagtaatcatgaattttggcgaaaggaaattcatgggcgcatcaaagattctatgagtactgtgtcttatatggaagaacccagtcagcgtgatgatatctctcgccttacagttcagatggaaaacacctatcagttgggtcctcccaaacattttcctgtggtcaccgtcaatcatattttgaaagatgtagtaaccagctatctacaagtagaagaatatgaaccagagctctgtagacagatgactaaaaccatttctgaggttattaaagcccaggtcaaggacttgatgattccacggtataaactaattgtgattgttcacattggacaactgaacaggcagagcatacttattggaagcagatgcctctgggatcctaaaagtgataccttttcatcttatgttttcagaaattcttctctcttcgctcttgcaaatgtctatgcagtttaccttgaggtgattgaaaataagaaatctagctcttacttttgaaaattctgaggcaggctgtatgtctgtacacaaaagttttactggcaaaaactttgagaaagaaacaacactgatattttcaagcaactggaagcttttgaattcttttcaaattccaataaagaattacggggaggggagggtagccaacagaaagaaatcctgtttaaccaaaagcaggaaacttgaaacttgggtttttgccgggatgcctttccaaagaaaaaagaattcccaaataaaaaaatcgcttctgggaccc

SEQ ID NO: 100 - DNA, 3018 bp, Homo sapiens
  CDS (144)..(2756)
  misc_feature (1)...(3018): n = a,t,c or g
ccggtccggaattcccgggcgaggcggcagctgcgcggcggcaccggggcggctgcggcgcgctcggagccccgagggcacgcggcccgggcagctcggtgtgcgcccccgcgagagccggggccccaggcccgccggacaccatgaaccacctgaacgtgctggccaaagcgctctatgacaatgtggccgagtccccggatgagctctccttccgcaagggtgacatcatgacggtgctggagcaggacacgcagggcctggacggctggtggctctgctcgctgcatgggcgccagggcatcgtgcctgggaaccgcctcaagatcttggtgggcatgtatgataagaagccagcagggcctggctccggccctcccgccaccccggcccagcctcagcctggcctccatgccccagcgcctccggcctcccagtacacgcccatgctccccaacacctaccagccccagccagacagcgtctacctggtgcccactcccagcaaggctcagcaaggcctctaccaagtcccgggtcccagccctcagttccagtctcccccagccaagcagacatccaccttctcgaagcagacaccccatcacccgtttcccagcccggccacagacctgtaccaggtgcccccagggcctggaggccctgcccaggatatttaccaggtgccaccttctgccgggatggggcatgacatctaccaggtccccccgtccatggacacacgcagctgggagggcacgaagcccccggcaaaggtggtggtgcccacccgcgtggggcagggctatgtatacgaggccgcccagccggagcaggacgagtacgacaccccgcgacacctgctggccccggggccacaggacatctatgatgtgcccccggttcgggggctgcttcccagccagtatggccaggaggtgtatgacacaccccccatggctgtcaagggtcccaatggccgagacccgttgctggaggtgtatgacgtgccccccagtgtggagaagggcctgccaccgtccaaccaccacgcagtctacgacgttcctccatcggtgagcaaggatgtgcccgatggcccactgctgcgtgaggagacctacgatgtgccccccgccttcgccaaggccaagccctttgacccggcccgcacccccctggtactgggtgcgccccctccagactccccgccggccgaggacgtgtattacgtgccgcccccggctcctgacctctacgacgtgccccctggcttgcggcggcctggcccgggcaccctgtacgatgtgccccgtgaacgggtgcttcctcctgaggtggctgatggtggcgtggtcgacagtggtgtgtatgcggtgcctcccccagctgaacgtgaagccccggcagagggcaagcgcctgtcggcctccagcaccggcagcacacgcagcagccagtctgcgtcctccttggaggtggcagggccgggccgggaacccctggagctggaagttgctgtggaggccctggcacggctgcagcagggtgtgagcgccaccgttgcccaccttctggacctggcaggcagcgccggtgcgactgggagctggcgtagcccctctgagccacaggagccgctggtgcaggacctgcaggctgctgtggccgccgtccagagtgccgtccacgagctgttggagtttgcccgcagcgcggtgggcaatgctgcccacacatctgaccgtgccctgcatgccaagcttagccggcagctgcagaagatggaggacgtgcaccagacgctggtggcacatggtcaggccctcgacgctggccggggaggctctggagccacccttgaggacctggaccggctggtggcctgctcgcgggctgtgcccgaggacgccaagcagctggcctccttcctgcacggcaatgcctcactgctcttcagacggaccaaggccactgccccggggcctgaggggggtggcaccctgcaccccaaccccactgacaagaccagcagcatccagtcacgacccctgccctcaccccctaagttcacctcccaggactcgccagatgggcagtacgagaacagcgaggggggctggatggaggactatgactacgtccacctacaggggaaggaggagtttgagaagacccagaaggagctgctggaaaagggcagcatcacgcggcagggcaagagccagctggagttgcagcagctgaagcagtttgaacgactggaacaggaggtgtcacggcccatagaccacgacctggccaactggacgccagcccaacccctggccccggggcgaacaggcggcctggggccctcggaccggcagctgctgctcttctacctggagcagtgtgaggccaacctgaccacactgaccaacgccgtggacgccttctttaccgccgtggccaccaaccagccgcccaagatctttgtggcgcacagcaagttcgtcatcctcagcgcccacaagctggtgttcatcggggacacactgtcacggcaggccaaggctgctgacgtgcgcacgcaggtgacccactacagcaacctgctgtgcgacctcctgcgcggcatcgtggccaccaccaaggccgctgccttgcagtacccatcgccttccgcggcccaggacatggtggagagggtcaaggagctgggccacagcacccagcagttccgccgcgtcctaggccagctggcagccgcctgagggtggtgaccccaggagggaggcaggggaggggtgcggcggtcccagctccctggctcccatgtcaagagtcgctgtgccacaggcttagggacaggaccccagctctgcgtcggtcctggtgccctggatgccaggaatctgtatatatttatggccgggcagggtgtggggccatgctcctcaggagccgaagcccaggggccggccagtggcttccccagcatgncacacgggcccgggttgggtcacagacggggct

SEQ ID NO: 101 - DNA, 1364 bp, Homo sapiens
  CDS (98)..(1273)
aaggatccttaattaaattaatcccccccccccaggcttacgaggcctgtgtcgggtagaaagggtccttcctggaccgggaccctctgccacgaccatggaccgtaggaaaaagcctttggacgtcacggcctcctcgttggtagatcttaaggctgaactcttccgaaagcaagaagaattcaaacaagaaaaacttctaaaagattctggagtttttggaaaaccaaaaacaactaacaagaaaccaagtatctggagcaaacagaatgtaggcgtttcaaatcgagctgagaaggatgctgaacagaagattgaagaacagaagactttagacaaagcaagggaaaaattggaagaaaaagccaaattatatgaaaaaatgactaaaggagactttatagatgaagaagtagaggatatgtaccttgtggatttcacacagaagatcatagacaagcgcaaagaaatggaggcatctggtgcccatagagattctcaaaaggcaggagaaagggacgacgatgaggaaaaccttcctgagggagagatccctcctccccaagaccccagtgaagaatgggtggattacgtggactctttggggcgttcccggcgctgtatgagaaaggatttgccagatctgctggagatggataaaaatcttcaggggagactttttattagtcctgctaatgaaaaaaccctattatctgaagatatgagaaaagaacttcagcgccagcaatgggaggaagaagaaagagaggccctgaagaggcccatggggcccgtacattatgaagacattcgggaaaatgatggagatgttattgggcctttgccaccggagccagaggctgtgccaaccccacgtcctgctgcccagagtagcaaagtagaagtcattgtccaggagaggaaggacaccaagcctggagtgccacacatccgggagtgggaccgcggaaaagaattttcctttggatactggtcgaagaggcagtcagatctccgggctgagagagatcctgagtttgccccaccgtcagattactttgtgggtcagaagagaactggtttttccagcagccaggcatggagcagacctgggccagcacagagtgacccagggcagtgccctgaccagagccacggacctagccctgaacatacgtcacccactcctgcccccgacaacccaccacaagcccccacagttactttcaaaactctggatgacatgatttcctattacaaacaagtgacatgatctttcaaaaaaaaaaaaaaagggcggccgctctagagtatccctcaaggggcccaagcttacgcgtacccagctttcttgtacaaagtgg

SEQ ID NO: 102 - DNA, 1592 bp, Homo sapiens
  CDS (98)..(1501)
aaggatccttaattaaattaatcccccccccccaggcttacgaggcctgtgtcgggtagaaagggtccttcctggaccgggaccctctgccacgaccatggaccgtaggaaaaagcctttggacgtcacggcctcctcgttggtagatcttaaggctgaactcttccgaaagcaagaagaattcaaacaagaaaaacttctaaaagattctggagtttttggaaaaccaaaaacaactaacaagaaaccaagtatctggagcaaacagaatgtaggcgtttcaaatcgagctgagaaggatgctgaacagaagattgaagaacagaagactttagacaaagcaagggaaaaattggaagaaaaagccaaattatatgaaaaaatgactaaaggagactttatagatgaagaagtagaggatatgtaccttgtggatttcacacagaagatcatagacaagcgcaaagaaatggaggcatctggtgcccatagagattctcaaaaggcaggagaaagggacgacgatgaggaaaaccttcctgagggagagatccctcctccccaagaccccagtgaagaatgggtggattacgtggactctttggggcgttcccggcgctgtatgagaaaggatttgccagatctgctggagatggataaaaatcttcaggggagactttttattagtcctgctaatgaaaaaaccctattatctgaagatatgagaaaagaacttcagcgccagcaatgggaggaagaagaaagagaggccctgaagaggcccatggggcccgtacattatgaagacattcgggaaaatgaggcccggcaacttggtgttgggtattttgcctttgcccgagacaaagagttgagaaacaagcagatgaaaaccttagagatgctgcgtgaacagacaacagatcagagaacaaaacgagaaaacataaaggaaaagcgaaaggctatcttagaggcaagacttgccaaacttcgacaaaaaaggatgaaaaaatcaaaagaaggtggaacagaagaagaaaatagagatggagatgttattgggcctttgccaccggagccagaggctgtgccaaccccacgtcctgctgcccagagtagcaaagtagaagtcattgtccaggagaggaaggacaccaagcctggagtgccacacatccgggagtgggaccgcggaaaagaattttcctttggatactggtcgaagaggcagtcagatctccgggctgagagagatcctgagtttgccccaccgtcagattactttgtgggtcagaagagaactggtttttccagcagccaggcatggagcagacctgggccagcacagagtgacccagggcagtgccctgaccagagccacggacctagccctgaacatacgtcacccactcctgcccccgacaacccaccacaagcccccacagttactttcaaaactctggatgacatgatttcctattacaaacaagtgacatgatctttcaaaaaaaaaaaaaaagggcggccgctctagagtatccctcaaggggcccaagcttacgcgtacccagctttcttgtacaaagtgg

SEQ ID NO: 103 - DNA, 498 bp, Homo sapiens
  CDS (100)..(342)
tgaaagccattttttttttcagctcacttcaagggtacctgaagcgaattggcaccaaagcagcagctgtattgccgcagttctagcttcaccttcacgatgtttcccttggtcaaaagcgcactaaatcgtctccaagttcgaagcattcagcaaacaatggcaaggcagagccaccagaaacgtacacctgattttcatgacaaatacggtaatgctgtattagctagtggagccactttctgtattgttacatggacatatgtagcaacacaagtcggaatagaatggaacctgtcccctgttggcagagttaccccaaaggaatggaggaatcagtaatcatcccagctggtgtaataatgaattgtttaaaaaacagctcataattgatgccaaattaaagcactgtgtacccattaagatatggcattattgaagaaataaagtacatttgaaaccttcaaaagtcggacggccgcgaatttagtagtagta

SEQ ID NO: 104 - DNA, 765 bp, Homo sapiens
  CDS (342)..(710)
gagcgcctgagaccttcgcagagcgtggaattcgtgtaaaagtcatttatgttatttaaatgatgtactgtactgctgtttacatggacgttttgtgcgggtgctttgaagtgccttgcatcagggattaggagcaattaaattattttttcacgggactgtgtaaagcatgtaactaggtattgctttggtatataactattgtagctttacaagagattgttttatttgaatggggaaaataccctttaaattatgacggacatccactagagatgggtttgaggattttccaagcgtgtaataatgatgtttttcctaacatgacagatgagtagtaaatgttgatatatcctatgggacttctaaaaggaactatgtctggaaggctgtggtccaaggccatttttgctggctataagcggggtctccggaaccaaagggagcacacagctcttcttaaaattgaaggtgtttacgcccgagatgaaacagaattctatttgggcaagagatgcgcttatgtatataaagcaaagaacaacacagtcactcctggcggcaaaccaaacaaaaccagagtcatctggggaaaagtaactcgggcccatggaaacagtggcatggttcgtgccaaattccgaagcaatcttcctgctaaggccattggacacagaatccgagtgatgctgtacccctcaaggatttaaactaacgaaaaatcaataaatcaatgtggatttgtgctcttgtaaaaaaaaaaaa

SEQ ID NO: 105 - DNA, 9405 bp, Homo sapiens
  CDS (496)..(9405)
atttttatgcggcggaccgtgcggaagaacgtctaggagggaggagtgggaggttgggggtgtcgctaggcgcccttagctccctccctctggaggagctgccgcggccactctgctgccgccgctgccgacgccattttgggttcgctttgcgaggggaaacgatcccagtgtcggttgcgggatccgcctcctctcagtttgcccctttagccctccacctttcccttctcctctctcgcatttccgccagtcggcttacccgctggccgcctcctgacaagcgggagggatccgcggtggacccagggaagcggaggagcctggcggccaccccctcttcctcacttccctgtactctcatcgctctcggcctcggcctcggcctccgacacgagaaagatgctggtttcgagttttggagatccttgttttttatggaacacagttctgtaaaattttcataagattccttggcaataacatacgcttgtgatggaccctagaaatactgctatgttaggattgggttctgattccgaaggtttttcaagaaagagtccttctgccatcagtactggcacattggtcagtaagagagaagtagagctagaaaaaaacacaaaggaggaagaggaccttcgcaaacggaatcgagaaagaaacatcgaaactgggaaagatgatggtttgactgatgcacagcaacagttttcagtgaaagaaacaaacttttcagagggaattttaaaattgaaaattggcctccaggctaagagaactaaaaaacctccaaagaacttggagaactatgtatgtcgacctgccataaaaacaactattaagcacccaaggaaagcacttaaaagtggaaagatgacggatgaaaagaatgaacactgtccttcaaaacgagacccttcaaagttgtacaagaaagcagatgatgttgcagccattgaatgccagtctgaagaagtcatccgtcttcattcacagggagaaaacaatcctttgtctaagaagctgtctccagtacactcagaaatggcagattatattaatgcaacgccatctactcttcttggtagccgggatcctgatttaaaggacagagcattacttaatggaggaactagtgtaacagaaaagttggcacagctgattgctacctgtcctccttccaagtcttccaagacaaaaccgaagaagttaggaactggcactacagcaggattggttagcaaggatttgatcaggaaagcaggtgttggctctgtagctggaataatacataaggacttaataaaaaagccaaccatcagcacagcagttggattggtaactaaagatcctgggaaaaagccagtgtttaatgcagcagtaggattggtcaataaggactctgtgaaaaaactgggaactggcactacagcggtattcattaataaaaacttaggcaaaaagccaggaactatcactacagtaggactgctaagcaaagattcaggaaagaagctaggaattggtattgttccaggtttagtgcataaagagtctggcaagaagttaggacttggcactgtggttggactggttaataaagatttgggaaagaaattgggttctactgttggcctagtggccaaggactgtgcaaagaagattgtagcaagttcagcaatgggattggttaataaggacattggaaagaaactaatgagttgtcctttggcaggtctgatcagtaaagatgccataaaccttaaagccgaagcactgctccccactcaggaaccgcttaaggcttcttgtagtacaaacatcaataatcaggaaagtcaggaactttctgaatccctgaaagatagtgccaccagcaaaacttttgaaaagaatgttgtacggcagaataaagaaagcatattggaaaagttctcagtacgaaaagaaatcattaatttggagaaagaaatgtttaatgaaggaacatgcattcagcaagacagtttctcatccagtgaaaagggatcttatgaaacctcaaagcatgaaaagcagcctcctgtatattgcacttctccggactttaaaatgggaggtgcttctgatgtatctaccgctaaatccccattcagtgcagtaggagaaagcaatctcccttccccatcacctactgtatctgttaatcctttaaccagaagtccccctgaaatttcttcacagttggctcctaatccattacttttaagttctactacagaactaatcgaagaagtttctgaatctgttggaaagaaccagtttacttctgaaagtacccacttgaacgttggtcataggtcagttggtcatagtataagtattgaatgtaaagggattgataaagaggtaaatgattcaaaaactacccatatagatattccaagaataagctcttcccttggaaaaaagccaagtttgacttctgaatccagcattcatactattactccttcagttgttaacttcactagtttatttagtaataagccttttttaaaactgggtgcagtatctgcatcagacaaacactgccaagttgctgaaagcctaagtactagtttgcagtccaaaccattaaaaaaaagaaaaggaagaaaacctcggtggactaaagtggtggcaagaagcacatgccggtctccaaaagggctagaattagaaagatcagagctttttaaaaacgtttcatgtagctcactatcaaatagtaattctgagccagccaagtttatgaaaaacattggacccccttcatttgtagatcatgacttccttaaacgccgattgccaaagttgagcaaatccacagctccatctcttgctctcttagctgatagtgaaaaaccatctcataagtcttttgctactcacaaactatcctccagtatgtgtgtctctagtgaccttttgtctgatatttataagcccaaaagaggaaggcctaaatctaaggagatgcctcaactggaagggccacctaaaaggactttaaaaatccctgcttctaaagtgttttctttacagtctaaggaagaacaagaacccccaattttacagccagaaattgaaatcccttccttcaaacaaggtctgtctgtgtctccttttccaaaaaagagaggcaggcctaagaggcaaatgaggtcaccagtcaagatgaagccacctgtactgtcagtggctccatttgttgccactgaaagtccaagcaagctagaatctgaaagtgacaaccatagaagtagcagtgatttctttgagagcgaggatcaacttcaggatccagatgacctagatgacagtcataggccaagtgtctgtagtatgagtgaccttgagatggaaccagataaaaaaattaccaagagaaacaatggacaattaatgaaaacaattatccgcaaaataaataaaatgaagactttaaagagaaagaaactgttgaatcagattctttcaagttctgtagaatcaagtaataaagggaaagtgcaatccaaactccataatacggtatcaagtcttgctgccacatttggctctaaattgggccaacagataaatgtcagcaagaaaggaaccatttatataggaaagagaagaggtcgcaaaccaaaaactgtcttaaatggtattctttctggtagtcctactagccttgctgttcttgagcaaacagctcaacaggcagctgggtcagcattaggacagattcttcccccattactgccttcatctgctagtagttctgagattcttccatcacctatttgctctcagtcttctgggactagtggaggtcagagccctgtaagtagtgatgcaggttttgttgaacccagttcagtgccatatttgcatttacactccagacagggcagtatgattcagactcttgcaatgaagaaggcctcaaaggggaggaggcggttatctcctcctactttgttgccaaattctccttcgcacttgagtgaactcacatctctaaaagaagctactccttccccaatcagtgagtctcatagtgatgagaccattcccagtgatagtggaattggaacagataataacagcacatcagacagggcagagaaattttgtgggcaaaaaaagaggaggcattcttttgagcatgtttctctgattccccctgaaacctctacagtgctaagcagtcttaaagaaaaacataaacacaaatgtaagcgcaggaatcatgattacctcagctatgacaagatgaaaaggcagaaacgaaaacggaaaaagaaatatccccagcttcgaaatagacaggatccagactttattgcagagctggaggaactaataagtcgcctaagtgaaattcggatcactcatcgaagtcatcattttatcccccgagatcttctgccaactatctttcgaatcaactttaatagtttctatacacatccttctttccccttagaccctttgcactacattcgaaaacctgacttaaaaaagaaaagagggagaccccctaagatgagggaggcaatggctgaaatgccttttatgcacagccttagttttcctctttctagtactggattctatccatcttatggtatgccttactctccttcaccccttacagctgctcccataggattaggttactatggaaggtatcctcccactctttatccacctcctccatctccttctttcaccacgccacttccacctccttcctatatgcatgctggtcatttacttctcaatcctgccaaataccataagaaaaagcataagctacttcgacaggaggcctttcttacaaccagcaggactcccctcctttccatgagtacctaccccagtgttcctcctgagatggcctatggttggatggttgagcacaaacacaggcaccgtcacaaacacagagaacaccgttcttctgaacaaccccaggtttctatggacactggctcttcccgatctgtcctggaatctttgaagcgctatagatttggaaaggatgctgttggagagcgatataagcataaggaaaagcaccgttgtcacatgtcctgccctcatctctctccttcaaaaagcttaataaacagagaggaacagtgggtccaccgagagccttcagaatctagtccattggccttgggattgcagacacctttacagattgactgttcagaaagttctccaagcttatcccttggaggattcactcccaactctgagccagccagcagtgatgaacatacaaaccttttcacaagtgcaataggcagctgcagagtttcaaaccctaactccagtggccggaagaaattaactgacagccctggactcttttctgcacaggacacttcactaaatcggcttcacagaaaggagtcactgccttctaacgaaagggcagtacagactttggcaggctcccagccaacctctgataaaccctcccagcggccatcagagagcacaaattgtagccctacccggaaaaggtcttcatctgagagtacttcttcaacagtaaacggagttccctctcgaagtccaagattagttgcttctggggatgactctgtggatagtctgctgcagcggatggtacaaaatgaggaccaagagcccatggagaaaagtattgatgctgtgattgcaactgcctctgcaccaccttcttccagtccaggccgtagccacagcaaggaccgaaccctgggaaaaccagacagccttttagtgcctgcagtcgcaagtgactcttgcaataatagcatctcactcctatctgaaaagttgacaagcagctgttccccccatcatatcaagagaagtgtagtggaagctatgcaacgccaagctcggaaaatgtgcaattacgacaaaatcttggccacaaagaaaaacctagaccatgtcaataaaatcttaaaagccaaaaaacttcaaaggcaggccaggacagggaataactttgtgaaacgtaggccaggtcgacctcggaaatgtccccttcaggctgtcgtatcaatgcaagcattccaggctgctcagtttgtcaacccagaattgaacagagacgaggaaggagcagcactgcacctcagtcctgacacagttacagatgtaattgaggctgttgttcagagtgtaaatctgaacccagaacataaaaaggggttgaagagaaaaggttggctattggaagaacagaccagaaaaaagcagaagccattaccagaggaagaagagcaagagaataataaaagctttaatgaagcaccagttgagattcccagtccttctgaaaccccagctaaaccttctgaacctgaaagtaccttgcagcctgtgctttctctcatcccaagggaaaagaagcccccacgtcccccaaagaagaagtatcagaaagcagggctgtattctgacgtttacaaaactacagacccaaagagtcgattgatccaattaaagaaagagaagctggagtatactccaggagagcatgaatatggattatttccagcgcccattcatgttgtgttttttgtttcaggaaagtatctaagacaaaagagaattgacttccagcttccttatgatatcctttggcagtggaaacacaatcagctatacaaaaagccagatgtcccactatataagaaaattcgttcaaatgtctacgttgatgtcaaacccctttctggttacgaagctaccacctgtaactgtaagaagccagatgatgacaccaggaagggctgtgttgatgactgcctcaatagaatgatctttgctgagtgttcccccaacacttgcccatgtggcgagcaatgctgtaaccagaggatacagaggcatgaatgggtgcaatgtctagaacgatttcgagctgaggaaaaaggttggggaatcagaaccaaagagcccctaaaagctgggcagttcatcattgaatacctaggggaggtcgtcagtgaacaggagttcaggaacaggatgattgagcagtatcataatcacagtgaccactactgcctgaacctggatagtgggatggtgattgacagttaccgcatgggaaatgaggcccgattcatcaaccatagctgtgacccaaattgtgaaatgcagaaatggtctgttaatggagtataccggattggactctatgctcttaaagacatgccagctgggactgaactcacttatgattataactttcattccttcaatgtggaaaaacagcaactttgtaagtgtggctttgagaaatgtcgaggaatcatcggaggcaagagtcagcgtgtgaatggactcaccagcagcaaaaacagccagcccatggccacacacaaaaaatctggacggtcaaaagagaagagaaagtctaagcacaagctgaagaaaaggagaggccatctctctgaggaacccagtgaaaatatcaacaccccaactagattgaccccccaattacagatgaagccaatgtccaatcgtgaaaggaactttgtgttaaagcatcatgtattcttggtccgaaactgggagaagattcgtcaaaaacaggaggaagtaaagcacaccagtgataatattcactcagcatcattatatacccgttggaatgggatctgccgagatgatgggaatatcaagtctgatgtcttcatgacccagttctctgccctgcagacagctcgatctgttcgaacaagacggttggcagctgcagaggaaaatattgaagtggctcgggcagcccgcctagcccagatcttcaaagaaatttgtgatggtatcatctcttataaagattcttcccggcaagcactggcagctccacttttgaaccttcccccaaagaaaaagaatgctgattattatgagaagatctctgatcccctagatcttatcaccatagagaagcagatcctcactggttactataagacagtggaagcttttgatgctgacatgctcaaagtctttcggaatgctgagaagtactatgggcgtaaatccccagttgggagagatgtttgtcgtctacgaaaggcctattacaatgcccggcatgaggcatcagcccagattgatgagattgtgggagagacagcaagtgaggcagacagcagtgagacctcagtctctgaaaaggagaatgggcatgagaaggacgacgatgttattcgctgtatctgtggcctctacaacgatgaaggtctcatgatccagtgtgacaagtgcatggtatggcagcactgtgattgtatgggagtgaactcagatgtggagcactacctttgtgagcagtgtgacccaaggcctgtggacagggaggttcccatgatccctcggccccactatgcccaacctggctgtgtctacttcatctgtttgctccgagatgacttgctgcttcgtcagggtgactgtgtgtatctgatgagggatagtcggcgcacccctgatggccacccggtccgtcagtcctatcgactgttatctcacattaaccgacataaacttgacatctttcgcattgagaagctttggaagaatgaaaaagaggaacggtttgcctttggtcaccattatttccgtccccacgaaacacaccactctccatcccgtcggttctatcataatgaactatttcgggtgccactctatgagatcattcccttggaggctgtagtggggacctgctgtgtgttggacctttatacgtattgtaaagggagacccaaaggagtaaaggagcaagatgtgtacatctgtgattatcggcttgacaagtcagcacacctgttttacaagatccaccggaaccgctatcctgtctgcaccaaaccctatgcttttgatcacttccccaagaagctcactcccaaaaaagatttctcgcctcattacgtcccagacaactacaagaggaatggaggacgatcatcctggaagtctgagcgctcaaagccacccctaaaagacttgggccaggaggatgatgctctacccttgattgaagaggttctagccagtcaagagcaagcagccaatgagatacccagcctggaggagccagaacgggaaggggccactgctaacgtcagtgagggtgaaaaaaaaacagaggaaagtagtcaagaaccccagtcaacctgtacccctgaggaacgacggcataaccaacgggaacgactcaaccagatcttgctcaatctccttgaaaaaatccctggaaaaaatgccattgatgtgacctacttgctggaggaaggatcaggcaggaaactgcgaaggcgtactttgtttatcccagaaaacagctttcgaaagtga

SEQ ID NO: 106 - DNA, 616 bp, Homo sapiens
  CDS (58)..(240)
gtagggagcgctcagtctaggccccttgtatgtgcaggtcacaatagaattcgatgaatgcagcaaaccaacatagctcattttaagttcaaactcccaggctcaagtgatccacccacctcagcttcccaggtagctagaactaaaagtgcgcaccaccacatgcagctaattttttttgtagagatggggttttgccatgttgcccaagctgggtctcgaaatcctgggctcaagtgatccgcctcctctggcttcccaaagcactaggaatacaggtgtgagccaacacatccggccatggatgcataggggtttaccagaagggaagggtcacataggaagtcaactagtggaaaaaagcgtaagtgtttaggaacctggaatctttcctggagggaaaagggtaggatttgtaggaagggaacgggggtagagggaggagataaagcatgaaagatacaccagtaagagtgtgtcctctggtggatgctgaggttaagaagaaaaaagagtgggaggactttgcctagaaaggagtttgggctttatctaggagatacggatcccatgaaggatctttactagaggagtattattgtctcctcgtccaagc

SEQ ID NO: 107 - DNA, 1635 bp, Homo sapiens
  CDS (288)..(650)
ccggaattcccgggtcgacgtttcgtggtgcgcctgcagggatcggaagccggttggggtgtgagaggttttctcgctctaggtaagcgaaacaagccgggggactgcgagccagggactcgggccgcggggcgggaagaagtggggcagcgcttggccaggccgaaaggactttgggggtgggggctgggagtccgtgtctcgaatgagggaggagaggtggagttgccggggctcaggcccggcctcgagcatgggcggatgagaggagtcgggagccgaggcctatggtccttcgggtgaggggagacggagccagcgaggagatggagcagaagcttgtggaggagattcttcaagcaatcactatgtcaacagacacaggtgtttcccttccttcatatgaggaagatcagggatcaaaactcattcgaaaagctaaagaggcaccattcgtacccgttggaatagcgggttttgcagcaattgttgcatatggattatataaactgaagagcaggggaaatactaaaatgtccattcatctgatccacatgcgtgtggcagcccaaggctttgttgtaggagcaatgactgttggtatgggctattccatgtatcgggaattctgggcaaaacctaagccttagaagaagagatgctgtcttggtcttgttggaggagcttgctttagttagatgtcttattattaaagttacctattattgttggaaataaactaatttgtatgggtttagatggtaacatggcattttgaatattggcttcctttcttgcaggcttgatttgcttggtgaccgaattactagtgactagtttactaactaggtcattcaaggaagtcaagttaacttaaacatgtcacctaaatgcacttgatggtgttgaaatgtccaccttcttaaatttttaagatgaacttagttctaaagaagataacaggccaatcctgaaggtactccctgtttgctgcagaatgtcagatattttggatgttgcataagagtcctatttgccccagttaattcaacttttgtctgcctgttttgtggactggctggctctgttagaactctgtccaaaaagtgcatggaatataacttgtaaagcttcccacaattgacaatatatatgcatgtgtttaaaccaaatccagaaagcttaaacaatagagctgcataatagtatttattaaagaatcacaactgtaaacatgagaataacttaaggattctagtttagttttttgtaattgcaaattatatttttgctgctgatatattagaataatttttaaatgtcatcttgaaatagaaatatgtattttaagcactcacgcaaaggtaaatgaacacgttttaaatgtgtgtgttgctaattttttccataagaattgtaaacattgaactgaacaaattacctataatggatttggttaatgacttatgagcaagctggtttggccagacagtatacccaaacttttatataatatacagaaggctatcacacttgtgaaattctcttgtctaatctgaatttgcattccatggtgttaacatggtatatgtattgttattaaagtaagtgacccatgtaaaaaaaaaaaaaaaa

SEQ ID NO: 108 - DNA, 961 bp, Homo sapiens
  CDS (347)..(634)
gaggacaagcagcctgcccagaagtggaagaaactgaaagtggagtcctgagagctgaatctgccgcaggcccgcgggccgcccgggaattaggaaagttagaggggatccacgcccacaagtgctatggactctgatcgcccaaccagagcaaacccagaaggacaactctccaagcctttcaatcactcccactaacccgtattgtggacacactattgtgaggcctactaaggatgtactgctgatgaccttttgaagagtggctagtggttggcccatgtaggctgagctcagctggtccatccttcttggacccacagactccctggggcatgttcttctcatgatgatgactgcaacacagagggcaagacatcctacacaagcacatttcaagattttgctcgcatcatctctgctaaaattcctttatccaaagcaaggaacacaactggttcaaataagcacaggcctccaaatatccagatctaaaaatggagtgttcacctcagctccttatttatcactgcaagagattctggggctggcagctagtgacatgagctggaatcctcttcctgaaattgctgtcttcttggatgggctctccacatcttccaccacgaagtaaaaacaattcttgtgggtgccagtggacctgctctgcagacccaggctcctctcccatggagcatcccaagtctgtccttatgggaagaagcaggagccctgtctggctgtaccccaagctgctttctctggaccaatgctgtcagcgatagagggaacccttccaccatcatgtgaagaagcctggtctagcctgctggaggatgagagatcacatggaatgaggccacaatcgttccagccaaagccccagtaatagaattaagatcatccaagaccatggcatcccgcctgagaagttcagatgagaagggccacctgaacaacc

SEQ ID NO: 109 - DNA, 707 bp, Homo sapiens
  CDS (152)..(376)
catggacccctttggaaccctttcggaattcccgggtcgacccacgcgtccgcttccggtccgctgagactggggcctcgctcgctcccgacccggttgcaagtgttgcggtgggagaaagtcgcgtccgcatcggaggggaagcgccgtcatgcctaagtattatgaggacaagccgcagggcggcgcgtgcgcgggcctgaaggaggacctgggcgcgtgtctgctgcagtcggactgtgtggtccaggaaggaaaatcacctcggcagtgtttgaaggaaggatactgcaactctttgaagtacgcattttttgagtgtaaaagatcagtgttggataacagggcaagattcagaggaagaaaaggatattgatgcattatgttgaagccaacatggaaaacaacaaatattttccctggtcattaacacaaagaagccaaaacaggaaacatactttttactacatctgtttggttggaccagatttcccctccgtggaacactgaagaaagtggatgagttgttttcgaatatgtataaagtaaatgattctcttgatccaagttatttttagaagaaaaacctaattgaacaggtatgggttgggagcataataaatgtgttttgagaattgttctaaagcacagaaaatggaaagactgttatttgcaaacttgactcttcaattgaagtacccaattag

SEQ ID NO: 110 - DNA, 753 bp, Homo sapiens
  CDS (51)..(737)
atagaccacatagggatttggccctcgagcaggaattcggcacgaggaagatggcggcggcagtactgggacagttgggtgcgttatggatacataacctgaggagccgggggaagctggccttgggtgttttacctcaatcatatatccacacaagtgcttctcttgacatttctcgaaaatgggagaagaagaataaaattgtttatcctccacaactgcctggagaacctcggagaccagcagaaatctaccactgtcgaagacaaataaaatatagcaaagacaagatgtggtatttggcaaaattgatacgaggaatgtctattgaccaggctttggctcagttggaattcaatgacaaaaaaggggccaaaataattaaagaggttctcttagaagcacaagatatggcagtgagagaccataacgtggaattcaggtccaatttatatatagctgagtccacctcaggacgaggccagtgcctgaacaccatccgctaccatggcagaggtcgctttgggatcatggagaaggtttattgccattattttgtgaagttggtggaagggcccccacctccacctgagccaccaaagacggcagttgcccatgccaaagagtatattcagcagttcgcagccggaccatcgttcacactctatgatgaggagattcagactccacagtgtatatattttgccatttattttctaaaaataaacaaaaattgaaggcaaaaaaaaaaaa

SEQ ID NO: 111 - DNA, 2055 bp, Homo sapiens
  CDS (357)..(2015)
attgagttcgcagaccctagtccagtgtggtggaattctgcaaatcaggtttctaaacattaacaaccggagagaaatgacattttggggccgccggtgactcttgcgtgcctctgctgccccctggtggcagccccgagtcacttccagcagggccccccaccccaagggcccagcctcgggcaggaagggtacaaagcccccgccgtggctctgccacgaggtctcctggaaatgaggggaacagcacagcgacgtccttgcgtcctaaatgcatcccctgatggccgtttttcgccacacaggcttggcaaaatctctgcgtcactgagcagcattttaacctcttgaatgagatgcctccgaccttttggatcctctttctgcacctctcaggggacaggtcccgtctgtacggcgctgcctacgagaaacccaagttcattactgcagccaaaggaaaggtgcaggcggtgggaggctcctgcaaggtgatgcgtctggccataagtcccactgccttctcccacctgctggcctgtgcccagcagttccggaagcagacccaggcccaggtgtacagtgaggacatggccctgaacataggctcggaaccagaaggcctgcaggtggaagagaaggagcgccctgtgcagaggctcagtagcgtcctggggcccctggaggagcttctgcagccgctattccccctgctcagcctctccaaggccagagtgcagacacctgcggttgttgccgattcagggaagtcgaagggcaaagacaaggagaggaaaacgtccacaggacaacacagcacagtccagcctgaggttgccgataagatagtcctggtcgcagacagacatctcctggagctgccactggaaggtctctctgtgttcgatgaagggacaatttcctctgtgtcacgagaattttctcttcaaatgctgtggaatcgcctccataaagaagagacagaaggtggcgtgaaaaaggagggaagaagcagagaccccaaaaagagaagcctagcgaagaagggcaggaagggcagcatcccccggaccatcccccctgactgcatcatagtcgactcagacaacttcaagttcgtcgtggacccatacgaggaggcccagggcccagaaatgctaactcctgtctccatcacccaagacattttggaaagattccaagacacattcacgtcgcgatgggcgggacatctgggaagcaagcactttcccagccaggcccagtgggagcaggccctgggcagctgcagcggtttcttcttctatggaatggagagcttcctgtcccatatattagtggagagattggtcgccatgaacttgcaagagtgccaggtggcagtcctgctggacctggcacggtcctaccagagcttgaagaggcacatggagagcgtggagcacaggagatctgttggccgttgggaagccaattggagaaacggtgcgtctccttcagaagatgagtggcgacgaggcggtgaaccaaggcgaggcttctcagaccttgaaggacaagctgctgctgctccaaagctccgagctccttcccaccacgctcaacttggtcctgtatgggctgccgcaccaagccatcgggtagtgcaggcctggacctgcctcccatcagctgctggggccccagcacttgcctctgcccttggctctgcccctctgccaacccatccccacctcccggctcccatccccagctcccagctcgctctccccttcctgggcctctccccagcccttggtgcagcctcagccagggaccctcccccagcgacttcccgcaaggcagccgcctggacctcgagctctgcctgcctgtgtgcgccatggggtctgcgtcggggctggagctgcgtctcttcccggggccaggacaagggcggcctccccttggcggcgctggtgctgagttgcttagaccagaagactattcagaccgtgagcctgtttttgatttgagtgttccactaaacaaacaacaaaagccaaaaaaaaaaaa

SEQ ID NO: 112 - DNA, 1151 bp, Homo sapiens
  CDS (118)..(702)
gttccagataatccctttcccagtcctgcctgacatctgggtagggggtttgtccctggaattctgggacactggctggggtttgaggagagaagccagtacctacctggctgcaggatgaagctggccagtggcttcttggttttgtggctcagccttgggggtggcctggctcagagcgacacgagccctgacacggaggagtcctattcagactggggccttcggcacctccggggaagctttgaatccgtcaatagctacttcgattcttttctggagctgctgggagggaagaatggagtctgtcagtacaggtgccgatatggaaaggcaccaatgcccagacctggctacaagccccaagagcccaatggctgcggctcctatttcctgggtctcaaggtaccagaaagtatggacttgggcattccagcaatgacaaagtgctgcaaccagctggatgtctgttatgacacttgcggtgccaacaaatatcgctgtgatgcaaaattccgatggtgtctccactcgatctgctctgaccttaagcggagtctgggctttgtctccaaagtggaagcctgtgattccctggttgacactgtgttcaacaccgtgtggaccttgggctgccgcccctttatgaatagtcagcgggcagcttgcatctgtgcagaggaggagaaggaagagttatgaggaagaagtgattccttcctggttttgagtgacaccacagctgtcagccttcaagatgtcaagtcttcgagtcagcgtgactcattcgttcttccaacagtttggacaccacaaagcaggagaaagggaacatttttctacagctggaaagtgagtcctatcctttgaggaaatttgaaaaaagacatggagtggtttgaaagctactcttcatttaagactgctctccccaaccaagacacatttgcctggaaattcagttcttagcttaaagactaaaatgcaagcaaaccctgcaattcctggacctgatagttatattcatgagtgaaattgtggggagtccagccatttgggaggcaatgactttctgctggcccatgtttcagttgccagtaagcttctcacatttaataaagtgtactttttagaacattaaaaaaaaaaaa

SEQ ID NO: 113 - DNA, 1475 bp, Homo sapiens
  CDS (58)..(1371)
gtgacagcacgctcctttgaagaggaaggagagcatttgggcagtagaaaacacagaatgtccgaagaaaaagactgtggtggcggagatgctctctccaatggcatcaagaaacacagaacaagtttgccttctcctatgttttccagaaatgacttcagtatctggagcatcctcagaaaatgtattggaatggaactatccaagatcacgatgccagttatatttaatgagcctctgagcttcctacagcgcctaactgaatacatggagcatacttacctcatccacaaggccagttcactctctgatcctgtggaaaggatgcagtgtgtagctgcgtttgctgtatctgctgttgcttctcagtgggaacggactggaaaacctttcaacccactgctgggagagacttatgaattagtgcgagatgaccttggatttagactcatctccgaacaggtcagccatcacccaccaatcagtgcatttcatgctgaaggattaaacaatgacttcatctttcatggctctatctatcccaaactgaaattctgggggaagagtgtagaagcagaacccaaaggaaccatcaccttggagctccttgaacacaatgaggcatatacatggacaaatcccacctgctgtgtgcataatatcattgtgggtaaactgtggatcgaacagtatggcaatgtggaaattataaaccacaagactggggacaaatgtgtgttgaattttaagccatgtggcctttttggtaaggaattacacaaagttgaaggctacattcaagataaaagcaaaaagaagctctgtgccctctatgggaagtggactgaatgtttatacagtgttgaccctgccacgtttgacgcttacaaaaaaaatgataagaaaaatacagaagagaagaagaacagcaaacagatgagcacctctgaggagttggatgaaatgccagtgccggattctgaaagtgtattcattatccctggaagcgttcttctatggcgaatagccccacggcctccaaattctgcccagatgtataattttactagttttgcaatggttttgaatgaagtagacaaagacatggagagtgtgattcccaagacagactgcaggttacggcctgacatcagagccatggaaaatggagagatagatcaagctagtgaagaaaaaaaacgacttgaggaaaaacaaagagcagcccgcaaaaacaggtccaagtcagaagaggactggaagacgaggtggttccatcaaggtcctaatccctacaatggagcacaggactggatttactctggcagctactgggacagaaattacttcaatttgcctgacatttattaaaatgcatacaagtcagggtgtttggctaatctacaaataagtcttaaacctatgtttttaaatttttttcccttggtttctacttatcttttaaaaaaaaaaaa

SEQ ID NO: 114 - DNA, 907 bp, Homo sapiens
  CDS (359)..(733)
atctttattatactttataaatgagatttcatttatataaatcaggaagctaaactaaaatagaaacactagatttaaattctgatttgaatactctgatcaaaataacaaatctcacactgggaaaccatctatcagcaagcagagagctactgtgtgtccttccttagaagagtttgaacaccgagaacccacagcatatttgcagtacagtaacagcaattcctttgtcattatcacagaactttaattttcatatactttgctgggaccaaccaaaccatcccatatatataaccatatccatatatatatatatatatatcccacatatatatgggatggtatatatatacacatgtatatgtatgtgtgtgtgtatatatgtgtatatatgtatacacacacacacacacacatatatatatatatacacacacacacacatatatatatggagagagagagagagacagtgtcttgctctgtcgcccaggctggagtgcagtggtacgatcttggctcattgcaacctccgcctcccaggctcaagcgattctcatgtctcagtctcccaagtagctgggattacaggtgtgcaccaccacaccaggctaaccattccatacattttatacaatcatttttaaaaagaagcatgaaccatttcggttttagagaattaagtttttttaaaaaagagactcttaaaaaaaagtcattatatgaataaaatctgctttgtgttaattccgacaaatcattccatcattgagtctgtcaccaattttttttttttgaaatggagtttcgctcttgttgcccaggctggagtgcaatggtacgatctcggcctcgtgccgaatttcttgctcgagggcaaaattccctatagtgagtcgattga

SEQ ID NO: 115 - DNA, 940 bp, Homo sapiens
  CDS (67)..(609)
ctggactcagggcggtttgaaagatcggcgcgcaccgcaggagcaacggttggtcctgcggctgtgatgtcggtgttgaggcccctggacaagctgcccggcctgaacacggccaccatcttgctggtgggcacggaggatgctcttctgcagcagctggcggactcgatgctcaaagaggactgcgcctccgagctgaaggtccacttggcaaagtccctccctttgccctccagtgtgaatcggccccgaattgacctgatcgtgtttgtggttaatcttcacagcaaatacagtctccagaacacagaggagtccctgcgccatgtggatgccagcttcttcttggggaaggtgtgtttcctcgccacaggtgctgggcgggagagccactgcagcattcaccggcacaccgtggtgaagctggcccacacctatcaaagccccctgctctactgtgacctggaggtggaaggctttagggccaccatggcgcagcgcctggtgcgcgtgctgcagatctgtgctggccacgtgcccggtgtctcagctctgaacctgctgtccctgctgagaagctctgagggcccctccctggaggacctgtgagggtggctggcccctgggctgccccttctcatggcttcgtgctgactccataaacattctctgttgaggatgtccagtcagggcttgacaggcccaggctcagccccccgtggctgggaaggttccctgcagtgccagtgctgcagcagggagagctgggcagaagcagcgagggggcccagctggcgagactgtagccccctcccactcccacactcactcttgcagagcctgtgtctttaagcagctggcgtgttacatctccatttaaggtttcctttgaacaaaaggtctgtggctaaaaaaagtttaaaaatcaaaaaaaaaaaaa

SEQ ID NO: 116 - DNA, 919 bp, Homo sapiens
  CDS (79)..(588)
tactactactaaattcgcggccgcgtcgactttttttttttttttaaacatttgaagaggtatggggcggagggggaaatggaatttgaccgactcactattgcccagactggagtgcagtggctattcataagcacaatcatagctcactgcagccttgaactcctgggctcaagcaatcctcctacctcagcttcccaagtagctgggactacaggcgtgtgccacagtggccagctaattttttcatttttaaaagatgacatcttactatattgcccatctagtcacaaactcctagcctcaagcaatcctcttgcctcagcctcacaagtagctaggattacaggcgcaggccatcatgaccaacaaaaagaaattttttatattgattgcatgatgaaatattttgaatatattgagttaaatagattttctcatttgtttatttgtgctgttttctttttaatgtggctattagaaaatttacaattaactatatgggtcacatttgtgacctccattgtatttctattgggcaatgctgtgctagactcaccagaacgtatacatatttttattttttagactgatgtatacagggcccctgtatacatgtgtatttctaccgccagtaactgaatacttctttaagaaggagaaatccttaaaaaatctggctttaggcctgacccataaagcctgaaacagctctaaattggatggcatacctataatgaaaagccatattttataagtccttgcaattttaaaagcgttaaatcccttggtaaaataaaaattacctggagaattatggccctaaactctagtccaactagaatgccatgccaattttggagaccggagaaactttcctttttttgctacaattggctttttcaaaggaaaaaagaaa

SEQ ID NO: 117 - DNA, 1114 bp, Homo sapiens
  CDS (352)..(882)
gtccgtggctgtcagcttgggtgtcctggctcggcttaggggcacaggcttgcgggcggacctagggacggcggaggcatcgtgtccttcctgcaggaaggaaggagcttccggagctttcctgggaggctcactggggccgcggagataacctgaggtcctgcaacaggctgggggcccaaggaccatcccaggccttggaacagttggtatctttcagtcgccgccctggagaggcaggtgtttgacttcctgggctaccagtgggcgcccatcctggccaactttgtccacatcatcatcgtcatcctgggactcttcggcaccatccagtaccggctgcgctacgtcatggtgtacacgctgtgggcagccgtctgggtcacctggaacgtcttcatcatctgcttctacctggaagtcggtggcctcttaaaggacagcgagctactgaccttcagcctctcccggcatcgctcctggtggcgtgagcgctggccaggctgtctgcatgaggaggtgccagcagtgggcctcggggccccccatggccaggacctggtgtcaggtgctggctgtgccctggagcccagctatgtggaggccctacacagttgcctgcagatcctgatcgcggctcaaaaccagaatcccagatggcttgctccacagaggaggaggaacccctggtggctgctggctggagtgggctggggccaaagcttctgggctttgtctgtggctgccaggtggtcagcgtgtttacggaggaagaggacagctttgatttcattggtggatttgatccatttcctctctaccatgtcaatgaaaagccatccagtctcttgtccaagcaggtgtacttgcctgcgtaagtgaggaaacagctgatcctgctcctgtggcctccagcctcagcgaccgaccagtgacaatgacaggagctcccaggccttgggacgcgcccccacccagcaccccccaggcggccggcagcacctgccctgggttctaagtactggacaccagccagggcggcagggcagtgccacggctggctgcagcgtcaagagagtttgtaatttcctctctcttaaaaaaaaaaaaaaaa

SEQ ID NO: 118 - DNA, 1510 bp, Homo sapiens
  CDS (56)..(538)
tgaaaaacagggatgtagttcagcagtgtctgaataaggctgatgactcagaatcatgcagtgcctggcttctcaggccgccgccagccgggactgctttaggcgcgaacccacgcttctgacctgtgctctgtctttgcagttctgcacggagctaaaccagccgaccctgcccaacatccgcaagtggaaggggccccggggatgctggaaggctgttgttgctgagaagccctcgaatcagctccagaaggtaccctcgtctgcaaagcctggcctttcccttcatttaatttatacatacttttcccctaatcaagggcatttaaaaatttcctttgccaatatccccggttcaattttgtatttctgcccaatttttaaatccttgccattcatttccaaatgccctggttttcggttcacgtttagattggtaatggactcctgccaagaaggaaatgagagccttagggtgttgggaggagaggaggggagaaaggcaacaaatgggtatttctgtcctttgtccttctaatcccttcgccacagttctgtcttctgccaagtttgtgcagagctcattactcgttgactgaaaatttcagattcaccttagttcacacatgaagtatttgcttctagtggtagaaattatgcacataatttcagcatagaaatgttctattgaaatgttcagcagattttggttttgaattttctttcatcagtatcacccatatgagcaggtaagggtaaatctctgtaaatacacgttttccctcatattattattcaaggccagatttattcaccttgcaatgcttaacatcaatggagttttagatttttaaacagactcctgataataaccaggagttgaaaatgtattattacataattttcctataaatgcagatttttaaatccctagtatacctaacatgcttacaaacacatgtgatttatacttaatatgattatgtttataatgtaggctcttaaatcataaatgtatactggattaaaagtggccatttttttgacagtaagcccctactctctttttagctactacttaaagaggtacatgtaaatcttctgtctctgggttttatgtttgggggtgtaaatggctcctgccagctgacagtgagtcagcacacttcagagaaggctggagataaagctgaatttgaatgcatctagttcagggttctcccttccagtccacgtggaaataataagaataataccaccttccttttttgatcgcactttacatgtatgtaggtgtctgagcttcacaagccttttatagtccattcagcactgcattcattcaacaaatcattaatgaaaggtggctatgtaccaggcatattgtttcatgccaggtacacactggtgagaaaaactccatgcctgcatgttttcactctttgcaagacacagtggggatcccggctggagcctgacctggcccctcccgcagggagtgcacagcccg

SEQ ID NO: 119 - DNA, 1778 bp, Homo sapiens
  CDS (505)..(1644)
tcccgggtcgacgatttcgtggttcgagttagagcacccgcgcggggagagtgggttcgagcagaaccccctctggacgggcaaggaaccctttcaggaaccccatgacggccgcggcgccggcagcagtaggacaggccgcgccgtacgcccgagaactgaggagtgggaccaggggcggggactgatgttgcgtatacgaggagcgagctgacgactggcgtggtgcctccgcccccctttcttgttgcatggcaacaacaaacacttgctcctgcggaccagatccccggaggagttgttgctgggcggagtcagagcagttcttgaggttcaaggaggcgggggagacctgagctcacgcttgctgagacagaagtcacagcaggattatgcccctcagggcaagaggaagagttcagaaactgccgccgtaacccaagaacaaagttgcatgcagagccaacctaagagcttcaaaatcgggattccttactgagaaagatgtataacataaaacagtcaacagataccaaggaagcagcagccatcgaggctagaagaaatcgagaaaaagagcgacaaaaccgattcttcaatgtgcggaaccgagtcatgggggtggatgtccaggccctgaacaaccaggtgggagaccgaaagcgtcgggaagcagcagaaagaagcaaggaggcagcttatggtaccagccaggtgcagtatgatgtggtagtccagatgttagagaaggaagaggcagatcgaacacgtcagctggccaagaaagtccaggagtttcgggagcagaagcagcagctcaagaacgggcgtgaatttagtctttgggatccaggccaagtctggaaggggcttccaacctatcttagttacagtaatacctatcctggtccagccagcctgcagtacttctctggggaagacctagacagggacacacggctgagaatgcagcaggggcagttcaggtacaacttggaaaggcaacagcaggagcaacagcaagccaaggttgatgagaattatacagatgcgctcagtaaccagctgcgcctcgccatggatgcacaggccacccatctggccaggctggaggagtcctgtcgtgcggccatgatgtgtgccatggccaacgccaacaaagcgcaggcagctgtgcaggctgggcgtcagcgctgtgagcgtcagcgtgaacagaaggccaaccttgcggagatccagcaccagagcacgagtgacctactgactgaaaacccccaggtcgcccaacaccctatggctccctaccgggtcctgccctattgctggaagggcatgactccagagcagcaagctgccatcaggaaagagcaggaagtacaacgctctaagaagcaagcacaccgtcaggctgagaaaacactggatactgaatggaaaagccagactatgagctcagcccaggcagtgctggagctagaagagcaggagagggaattgtgtgctgtatttcaaaggggtctaggatccttcaaccagcagctggctaatgagcaaaaagcccagcaggattacctgaattcagtaatctacaccaatcaacctacagcccagtatcaccagcagtttaacaccagcagccgctaagttcaggatgtctatctctctctcccttctcctccatcaagctcacaggtggttaggagtcaaagagaaaaatgctgcatactcccaccttctaacctaggtaataaagttctgcactcaaaatcaaaaaaaaa

SEQ ID NO: 120 - DNA, 678 bp, Homo sapiens
  CDS (229)..(486)
aatacattgtgccttttaagtttggtttggttgttgttgttgttgttttacttatttcaaacattgcttctttagctcctgactttttacttatatgcagatgaaacccgaaattgatttgtattttatttcttttaagtcaggtgccactgtcaagagctcaaacacgagtcggttccaagatggccgaatggaaacagctctggtgtgcagctcccagtgggattgatgcagaagacagtgatttctgcatttcgaactgaggtacctggttcatctcattgggactggttggacagtgagtgcagcccaaagagggcgagccgaagcagggtggggcattgcctcacctgggaagcgcaaggggtcggggaattccctttcccagccaagggaatccatggcagattgtacctggaaaatcaggacactcccgcccaaatactgcgcttttccaatggccttagcaaatggcacctggcttagcaggtcccacacctaagaagccttgctcactgtagcgcagcagtctgagatcaaccggtgaggcagcagcctagtagggggagaggcgtctgccactgctgaagcttgagtaggtaaacaaagcggctggggaagctcgcatatggcagagcccagtcgacgcggccgcgaatttagtagtagtaggcggca

SEQ ID NO: 121 - DNA, 3690 bp, Homo sapiens
  CDS (55)..(3690)
cgaattcccgggtcgacgatttcgtagttgagacacttcgagagtgaaaatataatgagcccagcgtgtgtggtttctcctcatgcaacctactccaccagcatcatcccaaatgccacactgtcttcctcttccgaggtcatcgctattcccactgctcagagtgcgggacagcgggaaagtaaaagttctggctcatcacatgcaaggataaaatccagagaccacctcatctccaggcatgctgtgaaaggtgatcctcagtctcccggtcgccactggaatgagggccatgccaccattctttcacaggacttagaccctcattcccctggtgaacccgcactgttggccctctgtgactcagccgtccctctaaatgctccagcaaatagggagaatgggtcccaagctatgccgtataattgtagaaacaacctggccttcccagcccacccccaagatgtggatggcaagagtgaatctagttattcagggggcggagggcacagcagctcggagccctgggaatacaaatcctcaggtaatggaagggcatcccccctgaagccgcatttagcaactcctggctattccactcccacaagtaacatgagcagctgcagtttggaccaaacgtccaacaaagaggatgctgggtcgctgtattctgaggaccacgatggctactgtgcatctgtgcacactgactctggacatggatctgggaatctgtgcaatagcagtgatggctttgggaaccccaggcacagcgtgatcaatgtttttgttggaagagctcagaaaaaccaaggggaccggtccaattaccaggataaatccctatcaagaaacatctctttgaagaaagcaaagaagcctcccctgccaccctcccggacagactccctccgcaggattcccaagaagagcagccagtgcaacgggcaggtgctcaacgagagcctgatcgccacactccagcactcgctgcagctgagcctcccaggcaaaagtggcagctcgccctcccagagcccctgcagtgacttggaagagccctggctgccccgctcccggagccagagcacagttagtgctggcagcagcatgacttccgccaccacccccaatgtctactccctgtgcggggccacgccatcgcagagtgacacaagcagcgtcaagtcagagtacacggacccctggggttattacattgactacacgggcatgcaggaagatccggggaacccggcagggggctgttcaaccagcagtggggtgcccactgggaacgggccagtccgccatgtccaagaagggtccagagccacaatgccccaagtgcccggtggttcagtcaaaccaaagatcatgtcaccagagaagtcacacagagtcatttctccatccagtgggtattccagccagtcgaatacacccacagcactcacccctgtgcctgtgtttttaaaatcagtgtcaccagcaaacgggaaggggaagcccaagcccaaggtaccagaaaggaagtcctctctgatatcttcagtatccatttcctcatcgtccacttctctttcttctagtacttctactgaaggaagtggcactatgaagaagctggatccagccgtgggctctcccccggctcctcctcctcctcctgttccctctcctccattcccttgtcctgcagacaggtctcctttccttcctcccccacctcctgtcacagattgctcccagggctctcctctgcctcactctcctgtgttcccccctccgccgccagaagctctcattcctttctgctccccacctgattggtgcctttctcctccccgccctgcactgagccccattcttccagattcacctgtgtccttgccattgcccccacctctcttaccttcctcggaacccccacctgccccacctcttgaccccaaattcatgaaagacaccaggccgcctttcacaaattctggccagccagaatcctcccggggatccttgaggccgccttctaccaaggaggagaccagcaggccccccatgcccctgataaccacggaagcattgcagatggtgcagttgaggcccgtgagaaagaactcaggcgctgaggcggcacagttgtctgaacgaacagctcaggaacaacgaactccagttgctccacagtaccacttaaagccatctgctttcctgaaatcccgaaatagcacaaatgaaatggagagtgaaagccagcctgcctctgtgacaagctcgcttccgacgcctgccaagagctcgagtcagggtgaccatggcagtgcggctgagcgtggtggccctgtgagccgcagccctggagctccaagcgctggggaggcagaggctcggcccagccccagcaccaccccactcccagactcttcacccagcaggaagccaccccccatttccaagaagcccaaactgttcctggtggtaccacctccgcagaaagattttgcagtggagcccgcagagaacgtgagcgaagccctccgagctgtgcccagccccacgacgggagaggagggctctgtgcacagcagggaggcaaaagagagttctgcagcccaagctggctctcatgccacgcaccctggcacctcggttcttgagggaggagctgcaggatccatgtctcccagcagagtggaagccaatgtccccatggttcagcctgatgtctcaccagcccccaagcaggaggagccagccgagaacagtgcggatactgggggcgatggggagagctgcctatctcaacaggacggagcagctggggtgccggagaccaacgcagccggttcatcctcagaggcctgtgacttcctcaaggaagacgggaatgatgaggtaatgacccccagtcgacccaggaccacagaagacctttttgcagctattcacagatccaaaaggaaagtcctcggccgtagagattcagatgatgaccactcccgaaaccattctccctccccgcccgtgacacccaccggcgctgccccaagcctggcctctccaaagcaagtggggtcgattcagagaagcatccgaaagagcagcaccagcagtgacaacttcaaagctctgctgctgaaaaagggcagtcgttcagacaccagcgcccgcatgtctgcagcagagatgctcaagaacacagaccctagattccagaggtcgaggtcagagccttccccagatgcccccgagagcccgtcaagctgctccccaagcaagaacagaagggcgcaggaggagtgggccaagaacgaaggcttgatgcctcggagtctgtccttttccggccccaggtacggccgcagccgaacgccgccttctgccgccagcagcaggtacagcatgcggaaccggatccagagcagccccatgaccgtcatctcggagggagaaggggaagccgtggagcctgtggacagcatagcccgcggggctctgggcgctgcggagggatgttccctggacggactggcgagggaggagatggacgagggcggcctgctctgtggggaggggcctgccgcctccctgcagccccaggcccccggccctgtggatgggacagccagtgcagagggcagagagccctccccacagtgtggcggttctctgagcgaggagagttag

SEQ ID NO: 122 - DNA, 537 bp, Homo sapiens
  CDS (82)..(411)
ggggattccgggtcgaccacgcgtccgcccacgcgtccgggcggggtcggcgctgccgggtgaaatcgtaggacagtgaagatgctgctggaattgtccgaggagcataaggaacacctggccttcctgcctcaagtggacagcgcgggtcagcgggcgtgggggcggtgttctgtgggctggggaggaggtcaaaggcagcgcctggcactcaacagccttctgactttcattgcagtggtcgccgagtttgggcggattgctgtggaattcctgagacgcggcgcaaacccaaaaatctacgaaggcgccgccagtaagaagggaaaggggaaggctccgcaggcttctagggcggttgcgagccattccctgtctcccgggagagaaacggattattgcgagtcctagggtcttgttccgattgtagtagaataaaaccagcagagctcttcagtcagggtgcaaatcctgcccgtcccttaagtagctgtgagattgttaaagcttctattaaatcagatttctcatggtaag

SEQ ID NO: 123 - DNA, 447 bp, Homo sapiens
  CDS (82)..(321)
ggggattccgggtcgaccacgcgtccgcccacgcgtccgggcggggtcggcgctgccgggtgaaatcgtaggacagtgaagatgctgctggaattgtccgaggagcataaggaacacctggccttcctgcctcaagtggacagcgcggtggtcgccgagtttgggcggattgctgtggaattcctgagacgcggcgcaaacccaaaaatctacgaaggcgccgccagtaagaagggaaaggggaaggctccgcaggcttctagggcggttgcgagccattccctgtctcccgggagagaaacggattattgcgagtcctagggtcttgttccgattgtagtagaataaaaccagcagagctcttcagtcagggtgcaaatcctgcccgtcccttaagtagctgtgagattgttaaagcttctattaaatcagatttctcatggtaag

SEQ ID NO: 124 - DNA, 3699 bp, Homo sapiens
  CDS (172)..(1257)
gcacgcaccgacccggaattcccgggtcgacgatttcgtccgaggttggagcggcgctgctcggccgcggacacacgagggacgcgcccgaggagctgcaggtggcagcccaggcggtccgaacccgtcggccggccgagcctggagtattgcctaagtgtaatcttgaacatgggcggtgctgtgagtgctggtgaagacaatgatgagctgatagataatttgaaagaagcacagtatatccggactgagctggtagagcaggctttcagagctatcgatcgtgcagactattatcttgaagaatttaaagaaaatgcttataaagacttggcatggaagcatggaaacattcacctctcagccccgtgcatctactcggaggtgatggaagccctagatctgcagcctggactctcgtttctgaacctgggcagtggcactgggtatctcagctccatggtgggcctcattctaggtccttttggtgtgaaccatggggtggaacttcactcagatgtgatagagtatgcaaagcagaaactggacttcttcatcagaacaagtgatagttttgacaagtttgacttctgtgaaccttcctttgttactgggaattgcctggagatttctccggattgttctcagtatgatcgtgtatactgtggggctggcgtgcagaaagagcatgaagagtacatgaagaatcttctcaaagtgggagggatccttgtcatgccactggaagagaagttgactaagataacacgcacaggtccttcagcttgggaaaccaaaaagattcttgctgtttcttttgctcctctgatccagccctgccattcagagtcaggaaaatcaagacttgtccagttaccaccagtggcagttcgcagcctccaggacttggctcgcatcgccatccggggcaccattaaaaagattattcatcaggaaactgtgagcaaaaacggaaacggactaaagaacacccccaggtttaaacgaaggagagttcgccgccgtcgaatggaaacgattgtctttttggacaaagaagtctttgccagtcggatttccaacccctcagatgacaacagctgtgaagacttggaagaggaacggagggaagaagaagagaagaccccgccggaaacaaagccagaccccccagtgaacttcctacgccagaaggtcctgagcctccctctgccagatcccctgaaatactacttgctttattacagagaaaaataagtctcctgtttgaaagggggaaataggaagagcagattgctgagtgtgaagttcgtgctgcctgtgtgctgttgaagggtcacctggaggcagacgttgtggggaagggaactgctgggctcatccacaccatggttttcttctagttcctgattgacctctaaaattctattcagttgtatgatttgtttacatagttccacaagaccttcattgcatagaagattgttttcccaaagtggagagaatcttcatagagaaaaagagaaggctgtttctttttcggctctgacgaaacactgaagtctgcgtaagagagactgtttgatgaccgtccctcatgcaacatgcacggtactcactaaaaatgaaaactgaagtggaaactaacctgtgttgcttataaagtgtgaaagcacaagcttataaatgtataaaatcttttctgggtgtgacgcacctgcgtccaagtttgaatttttatgatatgtaccacttaattactggcactgagtatcactgaatttcttagttttctagtggggaaacattattgagaagccctcccttattttaagtaagttgattaaatcttatgtgagttgccagttgtaatttttcaaaggaaaaattttgatggggtggaggaatgaattgccagataatctttctggaattccgagagaattccaaagagggtttttttttttttttttttaggacatcttttgatacctttaaaagaaccactgtcaagtaatccttaaaaaaatatcttggaaaaggaaacagattttttcctgtgtgtaagcaataagtgaagttacatttgccctaaccctagggatgattctttacccagttttaaagcccatcatggtattctaaggtgttgacaccctccatcctcagagcaggtcgaaaatattaaatagactggggactctatgatgggcagcctgtgctttttgacttcagtttgctatttttctgtgatcacattagtactgattcatagattctatcttttataattctggagaaaaagatttgttagttttgtaatttttttgtaagaccaaatgtatgtattttagtagctccattgcatgagaagagtgtaactcacactgacttgtgatatcagccttctctgggccttgtgtgtggagagctttctatcttaccaagtggtagggctaaaagaacaacagcctttttggtagtcacatagcagaatgatcagagttacattgcttattccaaaacattggttctttttaaaacatttttttttacccaaagaaaagaataatagaaattactaacaataaatataaattcagagtgttgatataggattcagtatccagagtttatttttaatcttaatcctcagcttcttgggagttgctgggcttcagtgtctctgtggtttcaccagcttagcttgagctctggttattttggatcttttctgctttttttaagtaactgagtcatttttaccacacagtccagtttgcatgtatagctaggaaacatgtattgctctagattgggcagtttaagtcattttaaagaaagttagttcatagttgttgccttttaactcatagtcaagcttcagtctttcaaagagaaatgtgtgattttcatttacttgctgatattttgtagtttggagatccttgtgggcattattctaactgatacgtagacacttacttggaaatttttggacattatattaaatgagtgctatctgtgaaattggttatattaggtggcttgactaatgttttttctataattgtatatggactgcatttttaaaaaaaccgcatttgcctttatgctagattgtaaaaaattatattagaatgcataagacatgtttttccttcatatgctagacttttcctagcatttcgtatttctgtgttgtcagtgtgtgatttttaaaccggaatttggtttaaaaaaaatctggtggtaatatatgtgagaaatactttggtgtttaccttatgaaaataaaggattgtaagtaaagtttcctgcgcaccttataccagaattcagtataatacactactttctgttttcaaacagataaatcataatatagtctgtattatctgtaagatctgtcttgtaaaccacattcttgacaactatttgcttttgagtagtttgtattttaatatgtgacttttgtcttgaaaagtagtaaagccatagacttgtgcaaaacaagtttcaagtttatagatattaagtttgtaatgtgagcatcaaatgtgtatgtaaaaatactttttaccagtctggaacttgggaaaatccagggaatttgaaacatagattttaatgagctggtaaacacaaatcatgtcaataaaggtagtcaggatattttatccttagcattgcttctgc

SEQ ID NO: 125 - DNA, 3749 bp, Homo sapiens
  CDS (624)..(2735)
  misc_feature (1)...(3749): n = a,t,c or g
gcacgagcagaagggcaaaagctcgcttgatcttgattttcagtacgaatacagaccgtgaaagcggggcctcacgatccttctgaccttttgggttttaagcaggaggtgtcagaaaagttaccacagggataactggcttgtggcggccaagcgttcatagcgacgtcgctttttgatccttcgatgtcggctcttcctatcattgtgaagcagaattcaccaagcgttggattgttcacccactaatagggaacgtgagctggggttagaccgtcgtgagacaggttagttttaccctactgatgatgtgttgttgccatggtaatcctgctcagtacgagaggaaccgcaggttcagacatttggtgtatgtgcttggctgangagccaatggggcgaagctaccatctgtgggattatgactgaacgcctctaagtcagaatcccgcccaggcggcgtcggccggatcgggccgcgacacctcctggccatgggggacgtgctgtccacgcacctggacgacgcccggcgccagcacatcgcagaaaaaaccgggaagatcctgacggagttcctccagttctatgaagaccagtatggcgtggctctcttcaacagcatgcgccatgagattgagggcacggggctgccgcaggcccagctgctctggcgcaaggtgccactggacgagcgcatcgtcttctcggggaacctcttccagcaccaggaggacagcaagaagtggagaaaccgcttcagcctcgtgccccacaactacgggctggtgctctacgaaaacaaagcggcctatgagcggcaggtcccaccacgagccgtcatcaacagtgcaggctacaaaatcctcacgtccgtggaccaatacctggagctcattggcaactccttaccagggaccacggcaaagtcgggcagtgcccccatcctcaagtgccccacacagttcccgctcatcctctggcatccttatgcgcgtcactactacttctgcatgatgacagaagccgagcaggacaagtggcaggctgtgctgcaggactgcatccggcactgcaacaatggaatccctgaggactccaaggtagagggccctgcgttcacagatgccatccgcatgtaccgacagtccaaggagctgtacggcacctgggagatgctgtgtgggaacgaggtgcagatcctgagcaacctggtgatggaggagctgggccctgagctgaaggcagagctcggcccgcggctgaaggggaaaccgcaggagcggcagcggcagtggatccagatctcggacgccgtgtaccacatggtgtacgagcaggccaaggcgcgcttcgaggaggtgctgtccaaggtgcagcaggtgcagccggccatgcaggccgtcatccgaactgacatggaccaaattatcacctccaaggagcaccttgccagcaagatccgagccttcatcctccccaaggcagaggtgtgcgtgcggaaccatgtccagccctacatcccatccatcctggaggccctgatggtccccaccagccagggcttcactgaggtgcgagatgtcttcttcaaggaggtcacggacatgaacctgaacgtcatcaacgagggcggcattgacaagctgggcgagtacatggagaagctgtcccggctggcgtaccaccccctgaagatgcagagctgctatgagaagatggagtcgctgcgactggacgggctgcagcagcgatttgatgtgtccagcacgtccgtgttcaagcagcgagcccagatccacatgcgggagcaaatggacaatgccgtgtatacgttcgagaccctcctgcaccaggagctggggaaggggcccaccaaggaggagctgtgcaagtccatccagcgggtcctggagcgggtgctgaagaaatacgactacgacagcagctctgtgcggaagaggttcttccgggaggcgctgctgcagatcagcatcccgttcctgctcaagaagctggcccctacctgcaagtcggagctgccccggttccaggagctgatcttcgaggactttgccaggttcatcctggtggaaaacacgtacgaggaggtggtgctgcagaccgtcatgaaggacatcctgcaggctgtgaaggaggccgcggtgcagaggaagcacaacctctaccgggacagcatggtcatgcacaacagcgaccccaacctgcacctgctggccgagggcgcccccatcgactggggcgaggagtacagcaacagcggcgggggcggcagccccagccccagcaccccggagtcagccaccctctcggaaaagcgacggcgcgccaagcaggtggtctctgtggtccaggatgaggaggtggggctgccctttgaggctagccctgagtcaccaccacctgcgtccccggacggtgtcactgagatccgaggcctgctggcccaaggtctgcggcctgagagccccccaccagccggccccctgctcaacggggcccccgctggggagagtccccagcctaaggccgcccccgaggcctcctcgccgcctgcctcacccctccagcatctcctgcctggaaaggctgtggaccttgggccccccaagcccagcgaccaggagactggagagcaggtgtccagccccagcagccaccccgccctccacaccaccaccgaggacagtgcaggggtgcagactgagttctaggccagtgggtccctgactgctgcacatggcacaggccgttcccttccggacccaggcaggctcagctctggggagggcaccctggtctgtgccttgtgggtggaggcggggcagggctgtgtggcaccgccagggagcgggcccacctgagtcactttattgggttcagtcaacactttcttgctccctgttttctcttctgtgggatgatctcagatgcaggggctggttttggggttttcctgcttgtgccaagggctggacactgctggggggctggaaagcccctcccttcctgtccttctgtggcctccatcccctcatgggtgctgccatccttcctggagagagggaggtgaaagctggtgtgagcccagtgggttcccgcccactcacccaggagctggctgggccaggaccgggagagggagcactgctgccctcctggccctgctccttccgcagttaggggtggaccgagcctcgctttccccactgttctggagggaaggggaaggagggggtcttcaggctggagccaggctgggggtgctgggtggagagatgagatttagggggtgcctcatggggtgggcaggcctggggtgaaatgagaaaggcccagaacgtgcaggtctgcggaggggaagtgtcctgagtgaaggaggggacccccatcctgggggatgctgggagtgagtgagtgagatggctgagtgagggttatggggagcctgaggttttatgggcctgtgtatccccttctcccggccccagcctgcctccctcctgcccgcctggcccacaggacgtgtggtggcgcctggcactcagggacccccagctgccccagccctggtctctggcgcatctcttccctcttgtcccgaagatctgcgcctctagtgccttttgaggggttcccatcatccctccctgatattgtattgaaaatattatgcacactgttcatgcttctactaatcaataaacgctttatttaaaaaaaaaaaa

SEQ ID NO: 126 - DNA, 1649 bp, Homo sapiens
  CDS (157)..(972)
atggctgtggccccctggggttctctcctggcctccctgggtggaagctgtggttcagcccgagaacttttcattcataaaaagaaaagactccgcacggcgcgggtgagtcagaacccagcagccgtgtaccccgcagagccgccagccccgggcatgttccgagactttggggaacccggcccgagctccgggaacggcggcgggtacggcggccccgcgcagcccccggccgcagcgcaggcagcccagcagaagttccacctggtgccaagcatcaacaccatgagtggcagtcaggagctgcagtggatggtacagcctcatttcctggggcccagcagttaccccaggcctctgacctaccctcagtacagccccccacaaccccggccaggagtcatccgggccctggggccgcctccaggggtacgtcgaaggccttgtgaacagatcagcccggaggaagaggagcgccgccgagtaaggcgcgagcggaacaagctggctgcggccaagtgcaggaaccggaggaaggaactgaccgacttcctgcaggcggagactgacaaactggaagatgagaaatctgggctgcagcgagagattgaggagctgcagaagcagaaggagcgcctagagctggtgctggaagcccaccgacccatctgcaaaatcccggaaggagccaaggagggggacacaggcagtaccagtggcaccagcagcccaccagccccctgccgccctgtaccttgtatctccctttccccagggcctgtgcttgaacctgaggcactgcacacccccacactcatgaccacaccctccctaactcctttcacccccagcctggtcttcacctaccccagcactcctgagccttgtgcctcagctcatcgcaagagtagcagcagcagcggagacccatcctctgacccccttggctctccaaccctcctcgctttgtgaggcgcctgagccctactccctgcagatgccaccctagccaatgtctcctccccttcccccaccggtccagctggcctggacagtatcccacatccaactccagcaacttcttctccatccctctaatgagactgaccatattgtgcttcacagtagagccagcttggggccaccaaagctgcccactgtttctcttgagctggcctctctagcacaatttgcactaaatcagagacaaaatatttcccatttgtgccagaggaatcctggcagcccagagactttgtagatccttagaggtcctctggagccctaaccccttccagatcactgccacactctccatcaccctcttcctgtgatccacccaaccctatctcctgacagaaggtgccactttacccacctagaacactaactcaccagccccactgccagcagcagcaggtgattggaccaggccattctgccgccccctcctgaaccgcacagctcaggaggcgcccttggcttctgtgatgagctgatctgcggatctcagctttgagaagccttcagctccagggaatccaagcctccacagcgagggcagctgctatttattttcctaaagagagtatttttatacaaacctaccaaaatggaataaaaggcttgaagctgtgaaaaaaaaaaaa

SEQ ID NO: 127 - DNA, 9964 bp, Homo sapiens
  CDS (217)..(5922)
ccggacttcccgggtcgacgatttcgtgcgggagggggccagcttgcttgcccggctcgctcacgggtcgttgaggccggtgacatgtctgtgagctgcggaggctgcggcccccagatctttctctttgacactttgcaataaaaaagggcagtgagattgaataggtgttttgtggattaactcttcattgattatatacaacaaaaaatagttatggcgactttcagaaacaatcacatgaagactaaagcatctgtcagaaaaagcttcagtgaagatgtgttccagtctgtaaagtctttattgcagagtcagaaggaactatgcagtgtaacagcagaggactgtttacagcaggatgagcatgccaatttaactgaggtcacatttctgggttttaatgaagagacagatgctgctcatatacaggatttagctgcagtttctttggaacttccagatattctgaattcactccacttctgcagtctaaatgaaaatgaaattatttgtatgaagaatataaataaaccattagatataagcagtgatcctctaaatcagagtcatccttctggaatgctttgtgtcatgagagtgtcacctacatcaccaagacttaggattgattttatctttagtctcctaagtaaatatgctactggtataaggtacaccttggacacattcttgcatcagaagcaccaacttgagaccactgatgaagatgatgatgatactaaccagtctgtgtcatccatagaggatgactttgtcactgcttttgagcacttagaagaggaagagacttcaaagccatacaatgatggaatgaacattactgtgctaaggagccagtgtgatgctgcttcccagacggttactggtcatcatttagaaacccatgatttaaagattctcattagctctggacagcagaagtcattggctaaaccctcaacttcctcagtgaatgtcctgggacataaagaactaccttctgtgaaaacttcagtcacaacatcaatttcagagccttggacccaaaggagtttctataggtcatctaatgcttcagataaagatagtgatttacagaaaacatttttttcgtcttctcctgcctactcatctgaatcagaatgttcaagtccaagtcctgttattttcttggatgaagagggatatcaaaaaagcttaaaagcaaaacttgagctgcctaaaattcctgtgatgaaagatgatatagaggattcagactcagaagtaagtgaattttttgatagttttgatcagtttgatgaactagaacaaactttagagacttgcctgtttaacaaagatcccgtcatagggaagtcatcgcagaggaaagggcacaaacatggaaagtcatgtatgaatcctcaaaaattcaagtttgatcgtccagctctcccagctaatgttagaaagccaactcctcgtaaaccagaatctccatatggtaacctgtgtgatgctccggattctcctcgcccagtgaaggcatcaagggaagatagtggtttatttagtcctattcgatcctctgcttttagtcctcttggaggctgtactccagctgaatgtttttgccaaacagatattggtggagataggattcatgaaaatcatgattctgtttattacacctatgaagactatgcaaaaagcatttcatgtgaagtactaggctcagttcttcgtacccaccatactaataccctatcaaatattaacagtattaaacatggagaaaataaaactgtaacttttaagcatggaaaccttgatcaaaaaaataaatctaaaaataaatccttaatgattaaaaatagcattcaaaaatttgcagcagatcttgtggaaaaaagttttggcagtgcatttaaagacttacagaaaggagtctcttcatgtaccaatgctttgtaccacttagccatcaaattgacatcatctgttttgcagatggcatttgatgagctgagaaggcagcgtgcattttcactaaaagaacgtgccattagtggcctggctaactttttggtgagtgaagctttatcaaatgccttaaaagatttacagtatgtaaagaagcagatattcacaaacacagttgctaggtttgctgcagatcttgctgaagagcttgtttttgaaggcatcatggaggtgtgtcagttttcatatcctcaaacgcctgcatctccacagtgtgggtcgtttgactttgaagacaaagtagtgaagttgtatgcaaaagatttgtctgaatctgtaatacaggaagcattcattgagctatcacaagttgatgtgacctttacaacaaaggcagcagttagtgtctctacggataatatcaagtatgtgagtgcagaaagtgtagtgccatcgacacaggctgtcacgttttccccttcttttcacaatcaagcaattatggtgacaaaaccagtgcaggaatataaaaaggaatacacagtgcagcaggccttgttttgtacttctggaattgttacttctataccggtgcccttggcaggaagtgcccttctcccatatcatatttcatctactgcatgtcaggccaaggctcatctgtcatctgatgatagtaattcaaatggtgattctgcccaagtgcatattgccacaaaaaacagagaagaaaaagcagcttgtctcagaaatatttgtttaccttcagaacacaatccaggtaatcagaatgattttaaaccaactaatgacgatattgaaatgcagagttcctcaaaattaccaaatgatcctgcaattattagcaacttttctgcagcagtggtgcatacgatagtaaatgaaactttagagtcaatgacatcattggaagttacaaaaatggttgatgaacgtacagattatttaactaaatctttaaaggagaaaacccctccattttcccactgtgatcaggcagtgctgcaatgcagtgaagctagtagcaataaggacatgtttgctgaccggttatctaaatctattattaaacattccatagataagagcaaatcagtgatcccaaatatagataaaaatgcagtatacaaggaaagcttgcctgtttctggagaagaatcacagttgacaccagaaaagtctcccaaatttcctgactctcagaatcagttaactcactgctcactttcagctgcaaaggattgtgttccagaatgtaaagtttctatggttcatggatcctccctagagacactgccatcttgtccagctgtgacaggtcagaaatctgacttgaaggaatctgctaaggatcaaccactgaaaaagcataacttgaatagtacatcacttgaggccttgtcttttggacgggaaaacccctttcctcattcacatactttctcatctacagcacttacctgtgtagatggtttgcatgtggaagataaacagaaagtcagagacagaaatgtaatacctgatactcctccatcaactcctctagtaccatcccgggctagttctgaatgggatatcaagaagttaactaaaaagctcaagggagaattagccaaagagtttgcacctgctacaccaccttctactccacacaactcatctgttggtagtttgtctgagaatgaacaaaatactatagaaaaagaagagttcatgttgaaactcatgcgatctctttctgaagaagttgagagtagtgaaagtggagagctcccagaagtggatgtgaagtcggagcactcagggaagaaggttcagtttgcagaagcattagctacacacatcctttctcttgcaactgaaatggcagcttcccatttagataacaaaataattcaagaacccaaggttaaaaacccttgcttaaatgtgcaaagtcaaagaagtgtgtcgcctacttttttaaacccctcagacgaaaatttgaaaacattatgcaattttgcgggtgatctggcagcagaagtcattacagaagctgagaaaatagcaaaagtccgaaattgtatgcttttcaagcaaaagaagaacagttgttatgctgatggtgacgaagattataaagtagaagagaagttggatatagaggctgtagtgcacccaagagaagtggatccgtttattctttcattaccaccaagttcttgtatgtcaggtctgatgtataagtatcccagctgtgaaagtgtgacagatgaatatgcaggtcaccttattcagatactaaaacaggaaggtggtaatagtgagttgataatggatcagtatgccaataggcttgcctaccgatctgttaaatcaggattacaggaagcagctaagacaaccaaagtgcagtgcaactcaagaatgttccctgtgccaagttcacaagtgaaaacaaacaaggaactgttaatgttttcaaacaaagagcaccaccaagaagcagacaaaaagagacaaagtaaaagaaatgaaggttacttttgtaaaaatcaaacttgtgaaaggaccctggatccatatagaaatgaggtctcccaactgtatagtttttcaacctctctcgttcacagcataacaaaagatgctaaggaagagttgacagcctctctagttggcctaccaaaatccttaacagattcttgcttgtttgaaaaatctggatatgaagaagataatgagtgtcacgttacaccagaattgcctaagtctcttcagccttcctcacaaaatcacaggttttaccacagcactggcagtttaaatggatatggttgtggagacaatgttgttcaagctgtagaacagtatgccaaaaaagtagtggatgacactctagagctaactctaggatctacagtgttccgagtgtctgagaccacaaaatcagcagacagggtcacttatgcagaaaagttgtcacctcttacaggtcaagcttgcagatactgtgaccttaaagaactccacaattgcactggaaattcatctcagcactttttcagacagggttctctcgccagtagtaagccagcttctaatccaaaatttagcagccgctatcagaaatctaggatttttcatctcagtgtccctcagattcatgttaatcttgataagaaggcagtgcttgctgagaagatagttgctgaagccattgaaaaagctgagcgagagctgagcagtaccagcctggcagccgacagtgggatcggacaggagggtgccagctttgctgaaagccttgccacagaaaccatgacagcagctgtcacaaatgttgggcatgctgttagcagttcaaaagaaatagaagactttcagtcaaccgagtctgtcagtagccagcagatgaacctcagtattggtgatgacagcactggtagctggtccaatttaagttttgaagatgaacaccaagatgaaagcagcagttttcatcatctaagtgaaagtaatggtaacagcagtagctggagcagtcttggtttagaaggagatttgtatgaggacaatttatcctttccaacatcagacagtgatggaccagatgataaagatgaagagcatgaggacgaagtagaaggtttggggcaagatggaaagacactgctaattacgaatattgacatggagccatgcacggtagacccccagctaaggattattcttcagtggctcattgcctctgaggctgaagttgcagaactttattttcatgactctgcaaataaggagtttatgctactttcaaaacaattacaagagaaaggatggaaagtgggagacctcctgcaggctgtgcttcaatactatgaagtgatggaaaaagcttccagtgaggagagatgcaagtcgctgtttgattggctcttggaaaatgcatagagcaaaccccaaaccagtatattttagtatttgtttggggaggggaacaagccaataaagatgtttaggataaaatttgaatagtgaatattaacatcgtaagtcagttgggaggcaagtaaatatagctttctgagcgctttgtgttatcactcggtgtatatagttcatacttttgtaatctgtcaaaatactaccttcatttattcttctatacacatgtgtagtgtgtcaagaccctaagaacatgtatttgaaggaaggtctaaccagggggttttcaggggcattgtctgaccacattctttttgtatccaaatagtgctgctagaaactgcactgaagtggctgaggataggttccagtgatagagttataattttgctcctttgcaaacaaatggtatctaattaataactagtctgacatcagaaaataaaattgaggctgatttttaaaaatttctagtagatttttggcctttctttcctgtttttaaaaatcagtttcattttcatatttcatagatcagctattggtagctttttgatttccccaaactatttaatttcttagcagaaacattagtattttaggtttctataaacactataagtgatagtttcccccatcctttcattgacattatttgccaatgctgccagtcattctggcatgaaaggtgtgtgtgtgtgtgtgtgtgtgtgtgtgtgtgtgtgtgtgtgtgtgtgtgtaagggagtactttaaccttgccagtttgttccctcttttattttactgttttctttttagaaacccactgttaaaatttaaaaaggtgctttaaaataaaacgcctataaagattgtgcagtaagaatttttattgacaataattaaaattttttttgacaattttgggttcccaacttatcttacaagtgaaaacttaaattgtaaaacatgttgaaattttaaaaattaatgttaatatggaaatgcatttagagaagcccagtagtttttattgttggatttttgaaaaaacctctaccaagaatgtggtgttttttttttttgtttgtttgttcgttttagaaaaattgggatttccccccaccccgccccacccagataaactatatctacactgtctcgtcaagttctctgacacgatctttctgggctctacatttcctactagtttgtgtccagaaactgcaagttgacatgaatagaggacaaaggttgtgtcttgcttttgtctctctcttccctccctgcaactctctctcccctcctcccactctcttccccctcccccctcctcccactgtctctcacctcccccaccccccactctctctcatctctcgctgtgtcctgtgtatgtgtgggtgtgtgtgtatttgggtgtgtaaatgttggttcttccactactggattttgtaatctaggataaatcactttttttggggactttgattttgctccattacgttttcattttttctgagcactgactgttctgaaagctgcacaaaacgtagaaagaagacatagcgcctgccagggaataggaaatgagggcacttacacattaatgtgaattagtaattgtggtatagaaatgttttatagtgaaagattcaaatttgcttttcaaaaaatgccaaaagctatttaaataattcgaggttacatcgtaggttttgatttttctcaatttaagatacagaaatacagcaagccttaatataaagtttcctaaagtttcttcaagtattttttaaggtggagaaatgcaggaattgtataaccagaattgttcctgcctttagcttttcagaacttgagatgtggcagcactggactgggtttttttaaatgttaggactaggaatgtttgctcttgttaattatgaattaattgattattaagtttagaatgcatttttacaagtatctaactatcaaattgtgtttagtaacttgagtgtatgcacaagtttgatcaacagcaaaatagagttctgaatttcttttaaagtgatgatatattattttgtgaaactttgtgtttgaaaatgtttatttctgtttatggtgtaatcattctgaggtgaggcttttcttatttcctttgcattttgctagagctgtgctgagttcagcatttgcttatttaaccactacataatgacagaccagttattaggtattagcatgtgtggtaataataatagtggaacttcacacttacatcaattcagtgcaggggcatagaataaaatattaaatattggcagatgtatgaaaagaagtgtgagttaaaaatattgaatattggcaggtgtgaaaacaagtgtcaaaattcctcatatagagaaaataattttgagtttagagtattatcttttaattaagtgtagtctaaacttaactttctgtaaaggcactttgtggtttttccaaagatgttctagatctatttggttgctctatagtcaaacagctcttttgaagacaactgtcttattttattacaaattggcttgacatatttatactgtaacattgtaatattgctgtgctgtacattttggcccttacgaaatacgtctttttcagaactgttaaagttttgatgtacatcgagctgaattctgtttttaccagtttcaaaaccttcaagtgatatgtggaaaaaagtgaatgagacctctgatagggggttttcagaaccttgttcacaccaaaatgtgacagttctttcatgttttcctaaaccaagttaaaattacatgtatattttggtgttaaggttgatttttaagatacttctgatttgtacaaaaggaatgtttcctttataaatcacagaagaaaatgacaatatctgttggatatttgatataatttaatggtgttataaaacctttaagaggattcatggtgaatatatgtgataacatctttatactttgaaaaatgttccacttacccttcagatatttgttgtaagttaattcaattcttaatactttaattttgctccaacaagggctttatgttgctggtaagagaatttatttactaaatgcactatgtataaagtgaaagatagtttacttatctgactttgatattagatggctgacattagtgcacataatgcagagtttaaccttgattcttcaacagagtccagatttaaatgtctacttagttaattagttagctgatattcttccacaattaatatattcaatttcccatcagtatatcactttaaattttatgtttttctaaggaaactttccacagaattttaaacaactgatgcatccatactcagggtgtagggagaatactttgcatttaaaaaccctgtccacctgtcaccagcacaagagaattagagcttcagtgagaatttagaaaaattatactaaagtgagatgcattttttctcattttcagcaagactcctctaagcatttactcatttactgtattcctgctctgaagatgtggatacagaattagtcactcttgtcactttatttatttattggtttttttttaaccatctgtgtacattcctttcatagggtagagttctagttctagaagttcttattttgtttttgttgtaatgtttgaatactatttaatatccggttttaatattgctggatttgctacctttggttacttgtgcagtgttaaaagtaatccactttcttgtttaatataccagatacatagcaaaagcagcttggaataattatagctgtttatttggctgtgctcagttactatattaagatcttgtactgtgtaacagtaactcttttttgcttttcagtaatttaatatgttcacttaacaaaatacgaactttgagatgcactaaagttttgtttcagcagtggctcaaaaaatttcagaaattacttttgtaattatttgcaattaattgttcttttatcttacaattgtttaagcctgtgatctttcttctcccagctaagagttcttcaataaatttaagaaat

SEQ ID NO: 128 - DNA, 2136 bp, Homo sapiens
  CDS (31)..(1992)
taatagtcacatgacacgtttcccgtcaagatggcggatactctcccttcggagtttgatgtgatcgtaatagggacgggtttgcctgaatccatcattgcagctgcatgttcaagaagtggccggagagttctgcatgttgattcaagaagctactatggaggaaactgggccagttttagcttttcaggactattgtcctggctaaaggaataccaggaaaacagtgacattgtaagtgacagtccagtgtggcaagaccagatccttgaaaatgaagaagccattgctcttagcaggaaggacaaaactattcaacatgtggaagtattttgttatgccagtcaggatttgcatgaagatgtcgaagaagctggtgcactgcagaaaaatcatgctcttgtgacatctgcaaactccacagaagctgcagattctgccttcctgcctacggaggatgagtcattaagcactatgagctgtgaaatgctcacagaacaaactccaagcagcgatccagagaatgcgctagaagtaaatggtgctgaagtgacaggggaaaaagaaaaccattgtgatgataaaacttgtgtgccatcaacttcagcagaagacatgagtgaaaatgtgcctatagcagaagataccacagagcaaccaaagaaaaacagaattacttactcacaaattattaaagaaggcaggagatttaatattgatttagtatcaaagctgctgtattctcgaggattactaattgatcttctaatcaaatctaatgttagtcgatatgcagagtttaaaaatattaccaggattcttgcatttcgagaaggacgagtggaacaggttccgtgttccagagcagatgtctttaatagcaaacaacttactatggtagaaaagcgaatgctaatgaaatttcttacattttgtatggaatatgagaaatatcctgatgaatataaaggatatgaagagatcacattttatgaatatttaaagactcaaaaattaacccccaacctccaatatattgtcatgcattcaattgcaatgacatcagagacagccagcagcaccatagatggtctcaaagctaccaaaaactttcttcactgtcttgggcggtatggcaacactccatttttgtttcctttatatggccaaggagaactcccccagtgtttctgcaggatgtgtgctgtgtttggtggaatttattgtcttcgccattcagtacagtgccttgtagtggacaaagaatccagaaaatgtaaagcaattatagatcagtttggtcagagaataatctctgagcatttcctcgtggaggacagttactttcctgagaacatgtgctcacgtgtgcaatacaggcagatctccagggcagtgctgattacagatagatctgtcctaaaaacagattcagatcaacagatttccattttgacagtgccagcagaggaaccaggaacttttgctgttcgggtcattgagttatgttcttcaacgatgacatgcatgaaaggcacctatttggttcatttgacttgcacatcttctaaaacagcaagagaagatttagaatcagttgtgcagaaattgtttgttccatatactgaaatggagatagaaaatgaacaagtagaaaagccaagaattctgtgggctctttacttcaatatgagagattcgtcagacatcagcaggagctgttataatgatttaccatccaacgtttatgtctgctctggcccagattgtggtttaggaaatgataatgcagtcaaacaggctgaaacacttttccaggaaatctgccccaatgaagatttctgtccccctccaccaaatcctgaagacattatccttgatggagacagtttacagccagaggcttcagaatccagtgccataccagaggctaactcggagactttcaaggaaagcacaaaccttggaaacctagaggagtcctctgaataatggatatacaccaaactggatacccaactttggaaattctgactggtctcagagtctacttgatagaaggactctttgagaaatgttagaaagcagcagcaattataaggcaaaataggtaatagaaatccaaaaggggatttt

SEQ ID NO: 129 - DNA, 1904 bp, Homo sapiens
  CDS (1)..(1677)
atggagctcctcaacacggtgcttctctactcccagaacccccggcggcgctcacggctccggaaacgcgccgcggggctgttagctcggctgggcacgggcggctccgtggcgcttcctgccacgccaggcctgcctgggccgcgccagcgccgctccaccgagggccgcgcgtcggccgccgccgggcctggcatcttcatccggttttttgttgcctctacaaagttggaaagggtctctcatttcctggttatttcttctgatgatcttgatggaaagactgatgagccctgggaattctttcaggatttggtgacatttgatgatgtggcatggtacctcaccacaagggagtggtttaagctggaccctgaacagagggcactggaatattatgggaacgtgacctctgtgggcgttcctgttttaaatcctgccttggtccctcacctggcacaaggacaagtgctactggtgtcagacccatcgcccaacactgatcctgctaagtactctgaaagcacctccgcgacccgacaccagatgaagggggaagatgcccagccacaggagatggcgtccacaagcttcccaagggccagtggtcccagtcctgaattcagacagcacggggactctgacgggaagagagggagcccacagaatctgcccatagaacatcattttgcttgtaaagagtgtggggacacctttcggcttaaagtcctgcttgtccagcaccagagagtccacagtgaggagaagggctgggaatgtggcgactgcgggaaggtctttaggggggtggcggagtttaatgagcacaggaaaagccacgtagctgcggagccccagcccggccccagtagggccctggagaatgccgcggagaagagggagcagatggagagggaggcaaagcccttcgagtgcgaggagtgcggaaaacggtttaagaagaatgcaggcctgagtcagcatctgagggtccacagcagagagaagccctttgattgcgaggaatgcgggcggtcgttcaaagtcaacacccacctcttccgacatcagaaacttcacacttcggaaaagcctttcgcctgcaaggcgtgcagcagggatttcctggatcgccaggagcttctcaagcaccagcgcatgcacactggccacctgcccttcgactgcgacgactgcggcaagtccttccgaggggtcaacgggctggccgagcaccagcgcatccacagtggggccaagccatacgggtgtccccactgcggcaagctcttccgaaggagctcggagctcaccaagcaccggcggatccacacgggcgagaagccctacgcctgcggccagtgcggcaaggccttccgccagagctccagcctcctggagcacgcacgcatccacagtggcgagcggccctacgcatgcggcgagtgtggcaaggccttccgtgggccctctgacctcatcaagcaccggcgcatccacagcggactgaaaccctatgagtgcgacaaatgcggcaaggccttccgccggagctccggcctcagtcgccaccggcggatccacagtggggcgcggcgctgcgaatgcagccagtgtggccgcgtgttcaagaggcgctcggcactgcagaagcatcagccaacccaccacgagtagaaacgccctgtggtcccgcgggacagggacggagtccccagaggggatggcagagtcaaaggagatgaacagttttgtagcgcttatatattttgtcttccaaaaggttgagaccgatttatactgccaccagcaatttataagtgttacgttcgcccatcaagagtagcttgtaccatttaacttagtttggctagtttaactggtaggaagtaccatcaaggtat

SEQ ID NO: 130 - DNA, 843 bp, Homo sapiens
  CDS (356)..(742)
ttttttttttgcaaagattcactttatttattcattctcctccaacattagcataattaaagccaaggaggaggaggggggtgaggtgaaagatgatctggaggaccgcaataggggtaggtcccctgtggaaaaagggtcaaaggccaaaggatgggagggggtcaggctggaactgaggagcaggtgggggcacttctccctctaacactctcccctgatgaagctctttgtgacgggcgagctcaggccctgatgggtgacttcgcaggcgtagactttgtgtttctcgaattctgctttcttcagcgaggcggccgagctggttggtggcggcggccgagctgacgcaaacatgcagatctttgtgaagaccctcactggcaaaaccatcacccttgaggtcgagcccagtgacaccattgagaatgtcaaagccaaaattcaagacaaggagggtatcccacctgaccagcagcgtctgatatttgccggcaaacagctggaggatggccgcactctctcagactacaacatccagaaagagtccaccctgcacctggtgttgcgcctgcgaggtggcattattgagccttctctccgccagcttgcccagaaatacaactgcgacaagatgatctgccgcaagtgctatgctcgccttcaccctcgtgctgtcaactgccgcaagaagaagtgtggtcacaccaacaacctgcgtcccaagaagaaggtcaaataaggtggttctttccttgaagggcagcctcctgcccaggccccgtggccctggagcctcaataaagtgtccctttcattgactggagcagcaaaaaaaaaaaa

SEQ ID NO: 131 - DNA, 424 bp, Homo sapiens
  CDS (40)..(267)
gtgttgaggttggcatacgtatcaaggacagtaactaccatggctcccgaagttttgccaaaacctcggatgcgtggccttctggccaggcgtctgcgaaatcatatggctgtagcattcgtgctatccctgggggttgcagctttgtataagtttcgtgtggctgatcaaagaaagaaggcatacgcagatttctacagaaactatgatgtcatgaaagattttgaggagatgaggaaggctggtatctttcagagtgtaaagtaatcttggaatataaagaatttcttcaggttgaattacctagaagtttgtcactgacttgtgttcctgaactatgacacatgaatatgtgggctaagaaatagttcctcttgataaataaacaattaacaaatactttggacagtaaaaaaaaaaaaaa

SEQ ID NO: 132 - DNA, 913 bp, Homo sapiens
  CDS (162)..(602)
agaaaaggagggggttcccatgccaaggcagaactgtctgggacagacgctgcccggatccctgcggctgcctgcactctggaccacgagctctgagagcagcaggttgagggccggtgggcagcagctcggaggctccgcgaggtgcaggagacgcaggcatggccggtgagctgactcctgaggaggaggcccagtacaaaaaggctttctccgcggttgacacggatggaaacggcaccatcaatgcccaggagctgggcgcggcgctgaaggccacgggcaagaacctctcggaggcccagctaaggaaactcatctccgaggttgacagcgacggcgacggcgaaatcagcttccaggagttcctgacggcggcgaagaaggccagggccggcctggaggacctgcaggtcgccttccgcgccttcgaccaggatggcgacggccacatcaccgtggacgagctcaggcgggccatggcggggctggggcagccgctgccgcaggaggagctggacgccatgatccgcgaggccgacgtggaccaggacgggcgggtgaactacgaggagttcgcgaggatgctcgcccaggagtgaggctccccgcctgtgtccccctggctgcgctctgagccttcagggccaccgcccgctgctgcttttgtgctgggactctccggggaaacctggtcggtggatgggaaactgcctccccctgggaggaaggctttgcgctccggggcctggatgcggcgccctcgggccgcctgcgagcccctctctgcctccagaccttgggcagaaggaggcctccttgggcctggtccccctttgccctgcagtggaatgagggcccctcagccccgcattgatctaaataaaggactgccgagttcaaaaaaaaaaaa

SEQ ID NO: 133 - DNA, 658 bp, Homo sapiens
  CDS (128)..(460)
gcaagatggcgccgcgggcatttcttccactgcccgtctgagggaacgctaagtagtgtgtccggcgccgtgttccagctccgcgttgttccgcgagaaagcgagaggccgagcccgggctggtgcgatggccgcggtggtggccaagcgggaagggccgccgttcatcagcgaggcggccgtgcggggcaacgccgccgtcctggattattgccggacctcggtgtcagcgctgtcgggggccacggccggcatcctcggcctcaccggcctctacggcttcatcttctacctgctcgcctccgtcctgctctccctgctcctcattctcaaggcgggaaggaggtggaacaaatatttcaaatcacggagacctctctttacaggaggcctcatcgggggcctcttcacctacgtcctgttctggacgttcctctacggcatggtgcacgtctactgaaatgggggcccgggggacttttttaaaaaaccagatcgggaggactgtggccagcaattaacaccatgtagacttccttagttcttaagtggttgaattcgctgcttgttctgtaacgttataaataatttatatctgaagacggagagcctgtaatattcttcagattaaatgaagcgtgagacaaaaaaaaaaaaa

SEQ ID NO: 134 - DNA, 852 bp, Homo sapiens
  CDS (447)..(812)
tgaaggaccggtccggaattcccgggtcgacttcgctgtcgacgatttcgtgacagaaggcaaaacccccagcccttggtctgaggtgggtgtgagggcccatctcagctcctgcacaaactggctgtgtgacctcagggcactctcttgggctctctggactccagcctggagactcactcgggcctacaccttcctgtggcaaaatgacctgctgctggcttccttgtgggcccagggttaaacaatgacagtaagaatggcttttattaggcatggagtagcaaccaccatcaccaatctccactcctgtatttccatcttttaaggaaggggtccctctaactggcacaaagggaacagaggccctttggtcagagatgtccctggggctgggcagccttaggtggggctcagaaccaaactgaggcgtgagcctttgggaaatgggaaagttactgctcacaggagcagtttttgttttgttttgtttttttgagactgtctcgctctgtcgtccaggctggatttgcaatggtgtgatctcggctcactgcaagctccacctcctgggttcaagcaattcttgtgcctcagcctcccaagtagctgggattacaggtgcctgccaccacgcccggctaatttttgtatttttagtagagacggggtttcaccatgttggccaggctggtctcaaactcctgacctcaagtgatctgcctgcctcagcctcccaaagtgctgggattacaggcctgagccaccgtgcctggcctgacagcagttttgagggaagcagttcctcgtgatgctggcccctcctgcctcccgtcgacccgggaattccgg

SEQ ID NO: 135 - DNA, 622 bp, Homo sapiens
  CDS (203)..(592)
atttggccctcgaggcccagaattcggcacgagcttagtcctttggttggattattggttctccaagtgacctgcacatgaacttggcaccagccaaatgccctcaaggatacaggcagataccacagctccagttcctgctttgtaaacattttacacttctattatttctttcgtgagtgggagtctcgctctgtcacccatgctggagtgcagtggcacgatcttggctcactgcaacctccgcctcctgggttcaagcgattctcttgcctcagcctctcgagtagctgggattacaggtatgtgccaccacacccagctaattttttttttatttttggtagagacagggttttgccctgttgaccaggctggtctcaaactcctgacctcaggggatctgcctgcctcggcctcccaaagtgctaggattacaggcatgagccactgcgcccagccctctgttatttctttacaacacaagttcattgtgaaagaattcgaaaacgaaccctatctagagacatatttcggtgtatatccttggacattttatatcctagtggctacatgtaagtgcacaccataataaaactgtacaaagtcaaaaaaaaaaaaa

SEQ ID NO: 136 - DNA, 1170 bp, Homo sapiens
  CDS (165)..(950)
cacacaccccggccacccagtcactggccaatgggctcctaggaagatcaaatgtcactataacacgagggtgtgagccgggcgccagtgcctgcagccggtgctgtccacagggagctccagcccttctcacactcgacccgcagaaaccacccaccttcaccatgtctgacgaggaagttgaacaggtggaggagcagtacgaagaagaagaggaagcccaggaggaagctgcagaagtccatgaggaagttcatgaaccagaggaagttcaagaagaggagaaaccgagacccaaactcactgctcctaagatcccagaaggggagaaagtggacttcgatgacatccagaagaagcgtcagaacaaagacctaatggagctccaggccctcatcgacagccactttgaagcccggaagaaggaggaggaggagctggtcgctctcaaagagagaatcgagaagcgccgtgcagagagagcggagcagcagaggattcgtgcagagaaggagagggagcgccagaacagactggcggaggaaaaggccagaagggaggaggaggatgccaagaggagggcagaggacgacctgaagaagaagaaagctctgtcttccatgggagccaactacagcagctacctggccaaggctgaccagaagagaggcaagaagcagacagcccgggaaatgaagaagaagattctggctgagagacgcaagccgctcaacatcgatcaccttggtgaagacaaactgagggacaaggccaaggagctctgggagaccctgcaccagctggagattgacaagttcgagtttggggagaagctgaaacgccagaaatatgacatcaccacgctcaggagccgcattgaccaggcccagaagcacagcaagaaggctgggaccccagccaagggcaaagtcggcgggcgctggaagtagagaggccagaaaggcccctcgaggcagagaccctccgccctcttgcacaccagggccgctcgtgggactccacatcctccagcccccacaatcctgtcaggggctccctgacagtcctgggggtggagaggccatcccggggcgtcccccgcgtctgtgtccttgctgccttcatcccctggggcctgtgaataaagctgcagaacccccaaaaaaaaaa

SEQ ID NO: 137 - DNA, 1107 bp, Homo sapiens
  CDS (165)..(887)
cacacaccccggccacccagtcactggccaatgggctcctaggaagatcaaatgtcactataacacgagggtgtgagccgggcgccagtgcctgcagccggtgctgtccacagggagctccagcccttctcacactcgacccgcagaaaccacccaccttcaccatgtctgacgaggaagttgaacaggtggaggagcagtacgaagaagaagaggaagcgaaaccgagacccaaactcactgctcctaagatcccagaaggggagaaagtggacttcgatgacatccagaagaagcgtcagaacaaagacctaatggagctccaggccctcatcgacagccactttgaagcccggaagaaggaggaggaggagctggtcgctctcaaagagagaatcgagaagcgccgtgcagagagagcggagcagcagaggattcgtgcagagaaggagagggagcgccagaacagactggcggaggaaaaggccagaagggaggaggaggatgccaagaggagggcagaggacgacctgaagaagaagaaagctctgtcttccatgggagccaactacagcagctacctggccaaggctgaccagaagagaggcaagaagcagacagcccgggaaatgaagaagaagattctggctgagagacgcaagccgctcaacatcgatcaccttggtgaagacaaactgagggacaaggccaaggagctctgggagaccctgcaccagctggagattgacaagttcgagtttggggagaagctgaaacgccagaaatatgacatcaccacgctcaggagccgcattgaccaggcccagaagcacagcaagaaggctgggaccccagccaagggcaaagtcggcgggcgctggaagtagagaggccagaaaggcccctcgaggcagagaccctccgccctcttgcacaccagggccgctcgtgggactccacatcctccagcccccacaatcctgtcaggggctccctgacagtcctgggggtggagaggccatcccggggcgtcccccgcgtctgtgtccttgctgccttcatcccctggggcctgtgaataaagctgcagaacccccaaaaaaaaaa

SEQ ID NO: 138 - DNA, 1124 bp, Homo sapiens
  CDS (165)..(902)
cacacaccccggccacccagtcactggccaatgggctcctaggaagatcaaatgtcactataacacgagggtgtgagccgggcgccagtgcctgcagccggtgctgtccacagggagctccagcccttctcacactcgacccgcagaaaccacccaccttcaccatgtctgacgaggaagttgaacaggtggaggagcagtacgaagaagaagaggaagcccaggaggaagaggagaaaccgagacccaaactcactgctcctaagatcccagaaggggagaaagtggacttcgatgacatccagaagaagcgtcagaacaaagacctaatggagctccaggccctcatcgacagccactttgaagcccggaagaaggaggaggaggagctggtcgctctcaaagagagaatcgagaagcgccgtgcagagagagcggagcagcagaggattcgtgcagagaaggagagggagcgccagaacagactggcggaggaaaaggccagaagggaggaggaggatgccaagaggagggcagaggacgacctgaagaagaagaaagctctgtcttccatgggagccaactacagcagctacctggccaaggctgaccagaagagaggcaagaagcagacagcccgggaaatgaagaagaagattctggctgagagacgcaagccgctcaacatcgatcaccttggtgaagacaaactgagggacaaggccaaggagctctgggagaccctgcaccagctggagattgacaagttcgagtttggggagaagctgaaacgccagaaatatgacatcaccacgctcaggagccgcattgaccaggcccagaagcacagcaagaaggctgggaccccagccaagggcaaagtcggcgggcgctggaagtagagaggccagaaaggcccctcgaggcagagaccctccgccctcttgcacaccagggccgctcgtgggactccacatcctccagcccccacaatcctgtcaggggctccctgacagtcctgggggtggagaggccatcccggggcgtcccccgcgtctgtgtccttgctgccttcatcccctggggcctgtgaataaagctgcagaacccccaaaaaaaaaaaa

SEQ ID NO: 139 - DNA, 1810 bp, Homo sapiens
  CDS (29)..(1540)
cgcttccaggttgaatttcctcccgaccatgatggtcaagggccgcctgttcgttcctgacagaattaacggcacagccaacaagatgaacggagctttggatcactcagaccaaccagacccagatgccattaagatgtttgtcggacagatcccccggtcatggtcggaaaaggagctgaaagaactttttgagccttacggagccgtctaccagatcaacgtcctccgggaccggagtcagaaccctccgcagagtaaaggttgttgtttcgtaacattttatacaagaaaagctgcacttgaggcccagaatgcactgcacaatattaaaactttacctgggatgcatcatcccattcagatgaaacctgcagatagtgaaaagtccaacgctgtggaagacagaaaattgttcataggaatggtatcgaagaaatgtaatgagaacgacatcagggtgatgttctctccatttggccagatagaagaatgccggatcctccggggacctgatgggctgagtcgaggctgtgcgtttgtcacattttctacaagggcaatggcacagaatgcaatcaaagccatgcatcagtctcagaccatggagggctgctcttcacctatcgtggtgaagtttgctgacactcagaaggacaaagagcaaaggcgcctccagcagcagctcgctcagcagatgcagcagctcaacactgccacctgggggaacctgacagggctgggcggactgaccccacagtatctggcgctcctgcagcaggccacctcctccagcaacctgggtgcgttcagcggcattcaacaaatggcaggcatgaatgctttacagttgcagaacctggcgacgctggctgctgctgcagctgcggcccagacctcagccaccagcaccaatgcaaaccctctctctaccacgagcagcgccctgggagccctcacgagtcccgtggctgcttcaacccccaactccactgctggtgcagccatgaactccttgacctctctcgggactctgcaaggactggctggagccactgttggactgaataatattaatgcactagcaggtatggcggctctgaatggaggacttggcgccacaggcttgacgaatggcacggctggcaccatggacgccctcacccaggcctactcaggaattcaacagtacgcagccgccgcgctgcccactctgtacagccagagcctgctgcagcagcagagcgctgcaggcagccagaaggaaggtccagagggggcaaacctctttatttaccaccttccacaggaatttggagaccaggacattctgcagatgttcatgccttttggaaatgttatctctgctaaagtcttcattgacaaacagaccaatctgagcaagtgctttggttttgttagctacgacaatccagtctctgcacaagctgctatccaagctatgaatggctttcagatcggcatgaaacgcttgaaggtgcagctgaagcgttccaaaaacgacagcaaaccttactgatcctaaccccagaggctccctgctctcattttagctttcttagggtaagtcccacgagccagcctgtctcaacagggaaggcagaggaggaccacattgccaacttttaccaagagagacggttatttttacaataaggcctccatgtccccacccacttcccctacccagtttgccataattaaaacttgggctactttgtttctattgagtaattcctcctccagatgtgccactgtattctcctttgttttgcgatttgaatctcct

SEQ ID NO: 140 - DNA, 1059 bp, Homo sapiens
  CDS (288)..(905)
gtcgctcctgcgctggagctctaggccggcgtctctccgcgagccgcgggtcaagtgccagtggctaagggtgcgcgagtagccgccacccgttcggcgttggctctggcgtcggggtcgttgtgtcgtgacaaccgctgcggtagccgtttccgaggcagcagttgcggccgctttagccctgagcgggatctgcggctgcctgcgagtctctgctgtgccgacccttctcttcgcggaccccacgccaagcagcgaccctgagccgacagccggagcgcccggcaatggcggcctcgacggcctcgcaccggcccatcaaggggatcttgaagaacaagacctctacgacttcctctatggtggcgtcggccgaacagccccgcgggaatgtcgacgaggagctgagcaaaaaatcccagaagtgggatgaaatgaacatcttggcgacgtatcatccagcagacaaagactatggtttaatgaaaatagatgaaccaagcactccttaccatagtatgatgggggatgatgaagatgcctgtagtgacaccgaggccactgaagccatggcgccagacatcttagccaggaaattagctgcagctgaaggcttggagccaaagtatcggattcaggaacaagaaagcagtggagaggaggatagtgacctctcacctgaagaacgagaaaaaaagcgacaatttgaaatgaaaaggaagcttcactacaatgaaggactcaatatcaaactagccagacaattaatttcaaaagacctacatgatgatgatgaagatgaagaaatgttagagactgcagatggagaaagcatgaatacggaagaatcaaatcaaggatctactccaagtgaccaacagcaaaacaaattacgaagttcatagacgagatttgttcaacactgcaattgtttgttagatgtaaaccctgtgactatagtacgttgcttcttgttcttcacaattcatgacttaagtaccaaaatgcataccagttattatatattgccaagaattaaatgataaacttagagactgg

SEQ ID NO: 141 - DNA, 735 bp, Homo sapiens
  CDS (119)..(445)
cggggccgcgatttcgtgcggaggcagaggtggaggcgcgttgaaaggtgagagcgcgagggcggtgcggggctgtctcccggctgggactcgctcgcgctcccggtgctaatggtttatgagaggggcgggggaagccgtgcctcctcgcggactaagagaaaaattcccgcgggcgctctttgggtgggccggagaacgcccctcagccctttgcgcctctaaccctcctcagctgagctgcagtgggcgcggtgcccgttatttccgccttggggaggtgcttggaactgatgtagggagctcggttggtgatttctcgggtttctggcctttccagacccttgtaattgttttctcggtgcagagctcttttggggtctgggggtttccgtcgtcctgcgcgcgtcatcgcgaagcttggcctgagggtccggtttcctagctactgtgcccctccctcctggaggcagagtgacggactagtgggctagcgggcgctgggttcctgcgtcccgccaaagaggtttgtaatcatgaaagttcacccttccgggtgttaattcctgagaggatctactccactgtctaccactcattcctgctgcattaaccttcattgttaacggattttaatgaataatatagttatcccggataccatgctggcaggatccactttgcgaaattgtggactgttggactgtgattctaagtgggggaaataggctttag

SEQ ID NO: 142 - DNA, 1400 bp, Homo sapiens
  CDS (62)..(1180)
gtcccactcaaggatgctttagaaatgataagaaagtagtggatgtggggaggcgcatgggatgaagacggcagcggagcaacagaagacgctgagagagttcgtggtggtgatgggcactgagcaggaccgggcctgcttcttcctcgagtcggctacctgggacttgcagattgcgctagcgagcttttatgaggacagaggggaagaagacatcataaccatttcacaggcaacccccagttcagtgtccagaggcacagcccccagtgataatagagtgacatccttcagagacctcattcatgaccaagatgaagatgaggaggaagaggaaggccagaggttttatgctgggggctcagagagaagtggacagcagattgttggccctcccaggaagaaaagtcccaacgagctggtggatgatctctttaaaggtgccaaagagcatggagctgtagctgtggagcgagtgaccaagagccctggagagaccagtaaaccgagaccatttgcaggaggtggctaccgccttggggcagcaccagaggaagagtctgcctatgtggcaggagaaaagaggcagcattccagccaagatgttcatgtagtattgaaactctggaagagtggattcagcctggataatggagaactcagaagctaccaagacccatccaatgcccagtttctggagtctatccgcagaggggaggtgccagcagagcttcggaggctagctcacggtggacaggtgaacttggatatggaggaccatcgggacgaggactttgtgaagcccaaaggagccttcaaagccttcactggcgagggtcagaaactgggcagcactgccccccaggtgttgagtaccagctctccagcccaacaggcagaaaatgaagccaaagccagctcttccatcttaatcgacgaatcagagcctaccacaaacatccaaattcggcttgcagacggcgggaggctggtgcagaaatttaaccacagccacaggatcagcgacatccgactcttcatcgtggatgcccggccagccatggctgccaccagctttatcctcatgactactttcccgaacaaagagctggctgatgagagccagaccctgaaggaagccaacctgctcaatgctgtcatcgtgcagcggttaacataaccgcccagccagctgcctggcctccctcctgtgtttcccatggccagtggccatgccccatggggatcgcccctcctgcccccttgtgcacacccagcagtccagtgcaacgtctcctccatagctctgggttcttagatcttggttggacgtttgttttctccttagttgcatttcctgggtttttgtgatgatcaatggactttaatgaaaaaaaaaa

SEQ ID NO: 143 - DNA, 2000 bp, Homo sapiens
  CDS (169)..(1764)
ggcccctttaggtgtcgctaaagaacacgtttgtacaaaaaagcaggctggtaccggtccggaattcccgggaagtgcgctcgggaggaagtgccgatcggctgctggggcgaaaagggggcgccgggccgctctagccgccctggtccagcgcctccctctctcagcatggacgaggagagcctggagtcggccttgcagacctaccgtgcgcagctgcagcaggtggagctggccttgggcgccggcctggattcgtctgagcaggctgacctgcgccagctgcagggggacctgaaggagctcatcgagctcaccgaggccagcctggtgtctgtcaggaagagcaggttgttggccgcgctggacgaagagcgcccgggccgccaggaagatgctgagtaccaggctttccgggaggccatcactgaggcggtggaggcaccagcagcggcccgtgggtccggatcagagaccgttcctaaagcagaggcggggccagaatctgcggcaggtgggcaggaggaggaagagggagaggacgaggaagagctgagtgggacaaaggtgagcgcgccctactacagctcctggggcactctggagtatcacaacgccatggtggcgggaacggaagaggcggaggatggctcggcgggtgtccgtgtgctttacctgtaccccactcacaagtctctgaagccgcgcccgttcttcctggagggaaagtgccgctttaaggagaactgcaggttctcccatgggcaggtgggctctctggatgagctgcgccccttccaggacccagacctgagctccctgcaggccggctctgcgtgtctggccaagcaccaggatggcctctggcacgcagcacgcatcaccgatgtggacaacggctactacacagtcaagtttgactcgctgctgctgagggaggccgtggtggagggggacggcatcctgcccccactgcgcacagaggccacagagtccgactcagacagcgacggtacgggtgactccagctatgccagagtggtggggtcggacgccgtggactctgcacagtcctctgccctctgtccgtctcttgcagtggtggggtcagatgctgtggactctgggacctgcagctctgcctttgctggctgggaggtgcacacgcgaggtataggctccagactcctcaccaagatgggctatgagtttggcaagggtttgggccgacacgcggaaggccgggtggagcccatccatgctgtggtgttgcctcgagggaagtcgctggaccagtgtgtggagaccctgcagaagcagaccagggttggcaaggctggcaccaacaagccccccaggtgccggggaagaggggccaggcctgggggccgcccagctcctcggaatgtgtttgacttcctcaatgaaaagctgcaaggtcaggctcctggggccctcgaggccggggcggccccagcggggaggaggagcaaggacatgtaccatgccagcaagagtgccaagcgggccctgagcctgcggctcttccagactgaggagaagatcgagcgaacccagcgggacatcaggagcatccaggaggctctcgcccgcaacgctggccggcatagcgtggcgtcagcccagctgcaggagaagctggcaggagcccagcgccagctggggcagctccgggctcaggaagccggcctgcagcaggagcagaggaaggcagacacccacaagaagatgactgagttctagagaccccacaagcactatggacgaagcgtgggaccccagcacgggctgccctcaggaagaccagtgttgcccgaggaggggccggcctgctggcctggggcgtgcggacactgctgagtggagacagagctgcggggtcccatctggacacttacttgcccacctgccagtgtcttgggcatttccttggcaaggacattaaagtgatttcatcacagtgtcaaaaaaaaaaaaaa

SEQ ID NO: 144 - DNA, 1152 bp, Homo sapiens
  CDS (19)..(246)
cttcctcaggcggcggccatggcgggacaggaggatccggtgcagcgggagattcaccaggactgggctaaccgggagtacattgagataatcaccagcagcatcaagaaaatcgcagactttctcaactcgttcgatatgtcttgtcgttcaagacttgcaacactaaacgagaaattgacagcccttgaacggagaatagagtacattgaagctcgggtgacaaaaggtgagacactcacctagaacagtgccgtgctgctgctgggaagttgctttacacaacacaggccacatgggaaaggccccagcagccttcagctccttcctttctccttaaagagcaacagggcttattcttgtttttcttttttcaaaagtgtggcctttgggctctgccatctggggtgtggtgtggtatgtgggaagaagttcagaggaaccgttggaaacgacgttaggcattttaccttttcagtaacattttatacatctacttgtcaatgtatttgagacattcacagccaaaagcctgggactctttgtgaaggtcctcctcacctctatctttctttctctctctctcaaactttccttaaagttctcattgcctttgcactgcttctgtgaacagtctttgtctcctccccacctttggtgggaagtgcggggcagtcctggtcaagacactcatgccctggcaatgtggctgccagagaatgttgttgctaacccaccagtttcttgttgatttggagaggtcaaggccaggcccccacttggcttgaagggacattttcagacttttctttctgtcacttggagtgtctatgcctctcatatttccctaataaactcctcaactttttatctgactgctgtgattatggtggggagaggagctagagatgggttcacttattgcacagaaatgtaatacatggcgttattattctaacataaaactttcagatgtagctgtttgattcaaagcctaggtggcttaccagcccaagtccccatgtttggactttcagctgactagctcatcttgggaatcatttggtcattcagcacatttaccaagtatttactatgtaggcatgttaaactccaataaaacatacagcattgaatcagaaaaaaaaaaaa

SEQ ID NO: 145 - DNA, 2133 bp, Homo sapiens
  CDS (599)..(1165)
  misc_feature (1)...(2133): n = a,t,c or g
taagcttgggccgagctgtccgacgtgtcactgcagggacccgcccggggtgggtctcgggctctcgctaccggagagggaggagaagggggaggttaaaggggaaggaccccggaagtgccccctcctcagtgcgggagagggagacgccgggggcangtccatgcctcccgcggcgtggttggtgcgtcccaggtgacgtcagaagcagcccgcccctgcctggatggtgcgccctgagtgacgtcaggagcagaggccggagctgtccatcagcaccaaaggccgcgggcgggctcagggcatggggccgcggttctggggcggccgagcccgngctcctgcgccttccccttcctcaggcccagcccgagttcccggacgccgcgggactggagtgccagccggtgttggacgtggagcggcgccgccaccgcgccgacaccattctctccggcccagcagcccccttcctcgcacgacggactttccctggaccccagtcagttggagcctctggcgccccgcaaccccggcccctcgggcctctgcacagcctctttcactcagaagctcaggtcgcctccagcccagcactatgccggggactgtggcaacactgcggttccagctgctgccccctgagccagatgatgccttctggggtgcaccttgtgaacagcccctggagcgcaggtaccaggcactgccggccctcgtctgcatcatgtgctgtttgtttggagtcgtctactgcttcttcggttaccgctgcttcaaggcagtgctcttcctcactgggttgctgtttggctcggtggtcatcttcctcctctgctaccgagagcgggtgctagagacacagctgagtgctggggcgagcgcgggcatcgctctgggcatcgggctgctctgcgggctggtggccatgctagtgcgcagcgtgggcctcttcctggtggggctgctgctcggcctgctgctcgcagctgctgccctgctgggctccgcaccctactaccagccaggctccgtgtggggtccactggggctgttgcctggggggcggcctgctctgtgccctgctcactctgcgctggccccgcccactcaccaccctggccaccgccgtgactggtgctgcgctgatcgccactgccgctgactacttcgccgagctgctactgctggggcgctacgtggtggagcgactccgggctgctcctgtgcccccactctgctggcgaagctgggccctgctggcactctggcccctgctcagcctgatgggcgttctggtgcagtggagggtgacagctgagggggactcccacacggaagtggtcatcagccggcagcgccgacgcgtgcaactgatgcggattcggcagcaggaagatcgcaagggagaaaaggcgggaaaaagagacctcctcgggctcccctcagaggtccccgggctcctcccaggcctgggccaccagatcccgcttatcggcgcaggccagtgcccatcaaacgcttcaatggagacgtcctctccccgagctatatccagagcttccgagaccggcagaccgggagctccctgagctccttcatggcctcacccacagatgcggactatgagtatgggtcccggggacctctgacagcctgctcaggccccccagtgcgggtatagccatatctgtctgtctagactctgcagtcaccagctctgccagctcgaggaggcctgctaggctgccactcagcctcctggctttggctgtccctctccccagcctggagagggctggcctggtcactagaagggaggattgtctcaggcgagtcttggcctgagaggaaagccccctcccaagctcccaagaggctcctgaggaactcggggtgtgaaccccattggggtgtgctcagggttgtgagtgtgttgcccgtgtgtctgtgtgtatgtgtgtgggggtgggcaggcttggaggggacgctgggacccttgccttagatttctgactggtagggtttctccaggctcagccccacctcttcactccctgccaaggtcccatgggccacctcctgcatgtctccgcggaggggctaccttccttcccatcgccctgcctcgcg

SEQ ID NO: 146 - DNA, 1612 bp, Homo sapiens
  CDS (463)..(1539)
taatccaggatctgactgaggcagactgcgattcggcatatagaacttatatcctgccagggcctcggtttcaaaaacaccttctgcaacttccgtcagtggccactccagcttcctggcgttgctgacagcctggctagaagcgagcgtgattcccataaagtcattgccaagcttgtagtctccgacgccataattgtaagtcagttctgcgacaaaatgatcatcctcaggcccaaatcccaccattgttttactccatttcccatcataaggcccattacaggcagctttgcagccttcttcaaattcctcatgccgcagaaccttcatccccaggacgtcccgatagaaacgcgccgtctggaagcggtttcccactttgaatacgaagtgcagagctctgcgagcagccatgattcccaggcttaagtgatcctttttaagaagatttattcctctatgatggagaagtatgaaaaaattgggaaaattggagaaggatcctatggagttgttttcaaatgtagaaacagggacacgggtcagattgtggccatcaagaagtttctggaatcagaagatgaccctgtcataaagaaaattgcccttcgggaaatccgaatgctcaagcaactcaagcatcccaaccttgttaacctcctggaagtcttcaggaggaaacggaggcttcacctggtgtttgaatattgtgaccacacagttctccatgagttggacagataccaaagaggggtaccagaacatctcgtgaagagcataacttggcagacactgcaagctgtaaatttttgccataaacacaattgcatacatagagacgtgaagccagaaaatatcctcatcacgaaacattccgtgattaagctttgtgactttggatttgctcggcttttgactggaccgagtgactactatacagactacgtggctaccaggtggtaccgctcccctgagctgctggtgggggacacgcagtacggccccccggtggatgtttgggcaattggctgtgtctttgctgagctgctgtcaggagtgcctctgtggccaggaaaatcggatgtggatcagctgtatctgattaggaagaccttgggggatctcattcctaggcaccagcaagtgtttagcacgaatcagtacttcagtggagtgaaaattccagaccctgaagatatggaaccacttgaattaaaattcccaaacatctcttatcctgccctggggctcctaaagggctgtctccacatggaccctactgaaaggctgacatgtgaacagctgttgcatcacccatattttgaaaacatcagagaaatagaggatttggcaaaagaacacaacaaaccaacaaggaagaccctaagaaagagccgaaagcaccactgctttacagaaacatccaagttgcagtacctaccccagctaactggcagcagcatccttccagctttggataataagaagtactactgtgataccaagaaacttaactaccgttttccaaacatttaaaggagctaaggagagatgattttaaaaaaggaatcaatagatgctttgaagaaaataaaacttatacagttca

SEQ ID NO: 147 - DNA, 2283 bp, Homo sapiens
  CDS (71)..(1414)
cagggatttgaaccgcgctgacgaagtttggtgatccatcttccgagtatcgccgggatttcgaatcgcgatgatcatcccctctctagaggagctggactccctcaagtacagtgacctgcagaacttagccaagagtctgggtctccgggccaacctgagggcaaccaagttgttaaaagccttgaaaggctacattaaacatgaggcaagaaaaggaaatgagaatcaggatgaaagtcaaacttctgcatcctcttgtgatgagactgagatacagatcagcaaccaggaagaagctgagagacagccacttggccatgtcaccaaaacaaggagaaggtgcaagactgtccgtgtggaccctgactcacagcagaatcattcagagataaaaataagtaatcccactgaattccagaatcatgaaaagcaggaaagccaggatctcagagctactgcaaaagttccttctccaccagacgagcaccaagaagctgagaatgctgtttcctcaggtaaacgtggaataaatggtaacagagattcaaaggtaccttcagaaggaaagaaatctctctacacagatgagtcatccaaacctggaaaaaataaaagaactgcaatcactactccaaactttaagaagcttcatgaagctcattttaaggaaatggagtccattgatcaatatattgagagaaaaaaaaaacattttgaagaacacaattccatgaatgaactgaagcagcagcccatcaataagggaggggtcaggactccagtacctccaagaggaagactctctgtggcttctactcccatcagccaacgacgctcgcaaggccggtcttgtggccctgcaagtcagagtaccttgggtctgaaggggtcactcaagcgctctgctatctctgcagctaaaacgggtgtcaggttttcagctgctactaaagataatgagcataagcgttcactgaccaagactccagccagaaagtctgcacatgtgaccgtgtctgggggcaccccaaaaggcgaggctgtgcttgggacacacaaattaaagaccatcacggggaattctgctgctgttattaccccattcaagttgacaactgaggcaacgcagactccagtctccaataagaaaccagtgtttgatcttaaagcaagtttgtctcgtcccctcaactatgaaccacacaaaggaaagctaaaaccatgggggcaatctaaagaaaataattatctaaatcaacatgtcaacagaattaacttctacaagaaaacttacaaacaaccccatctccagacaaaggaagagcaacggaagaaacgcgagcaagaacgaaaggagaagaaagcaaaggttttgggaatgcgaaggggcctcattttggctgaagattaataattttttaacatcttgtaaatattcctgtattctcaacttttttccttttgtaaatttttttttttttgctgtcatccccactttagtcacgagatctttttctgctaactgttcatagtctgtgtagtgtccatgggttcttcatgtgctatgatctctgaaaagacgttatcaccttaaagctcaaattctttgggatggtttttacttaagtccattaacaattcaggtttctaacgagacccatcctaaaattctgtttctagatttttaatgtcaagttcccaagttccccctgctggttctaatattaacagaactgcagtcttctgctagccaatagcatttacctgatggcagctagttatgcaagcttcaggagaatttgaacaataacaagaatagggtaagctgggatagaaaggccacctcttcactctctatagaatatagtaacctttatgaaacggggccatatagtttggttatgacatcaatattttacctaggtgaaattgtttaggcttatgtaccttcgttcaaatatcctcatgtaattgccatctgtcactcactatattcacaaaaataaaactctacaactcattttaacattggttactttaaagctacatagccccatcgaaatgcgaggattaatgctttaatgcttttaaagacagggtctccctgtgttgcccaggctggtttcaaactcccccaaatggactttttattcattttatggaaaagactaggctttgcttagtatcatgtccatgtttccttcacctcagtggagcttctgagttttatactgctcaagatcgtcataaataaaattttttctcattaaaaaaaaaaaa

SEQ ID NO: 148 - DNA, 3089 bp, Homo sapiens
  CDS (79)..(2571)
ggaattcgcactgtcaagaatgagttctccctcaagaccttcaagaggaagtccgaggtggatcgtgctgtcaagaggatgcggcatctgtccacgggcaccatgaccgggctggccatccagtatgccctgaacatcgcattctcagaagcagagggggcccggcccctgaggcagaatgtgccacgggtcataatgatcgtgacagatgggagacctcaggactccgtggccgaggtggctgctaaggcacgggacacgggcatcctaatctttgccattggtgtgggccaggtagacttcaacaccttgaagtccattgggagtgagccccatgaggaccatgtcttccttgtggccaatttcagccagattgagacgctgacctccgtgttccagaagaagttgtgcacggcccacatgtgcagcaccctggagcataactgtgcccacttctgcatcaacatccctggctcatacgtctgcaggtgcaaacaaggctacattctcaactcggatcagacgacttgcagaatccaggatctgtgtgccatggaggaccacaactgtgagcagctctgtgtgaatgtgccgggctccttcgtctgccagtgctacagtggctacgccctggctgaggatgggaagaggtgtgtggctgtggactactgtgcctcagaaaaccacggatgtgaacatgagtgtgtaaatgctgatggctcctacctttgccagtgccatgaaggatttgctcttaacccagataaaaaaacgtgcacaaagatagactactgtgcctcatctaatcacggatgtcagcacgagtgtgttaacacagatgattcctattcctgccactgcctgaaaggctttaccctgaatccagataagaaaacctgcagaaggatcaactactgtgcactgaacaaaccgggctgtgagcatgagtgcgtcaacatggaggagagctactactgccgctgccaccgtggctacactctggaccccaatggcaaaacctgcagccgagtggaccactgtgcacagcaggaccatggctgtgagcagctgtgtctgaacacggaggattccttcgtctgccagtgctcagaaggcttcctcatcaacgaggacctcaagacctgctcccgggtggattactgcctgctgagtgaccatggttgtgaatactcctgtgtcaacatggacagatcctttgcctgtcagtgtcctgagggacacgtgctccgcagcgatgggaagacgtgtgcaaaattggactcttgtgctctgggggaccacggttgtgaacattcgtgtgtaagcagtgaagattcgtttgtgtgccagtgctttgaaggttatatactccgtgaagatggaaaaacctgcagaaggaaagatgtctgccaagctatagaccatggctgtgaacacatttgtgtgaacagtgacgactcatacacgtgcgagtgcttggagggattccggctcgctgaggatgggaaacgctgccgaaggaaggatgtctgcaaatcaacccaccatggctgcgaacacatttgtgttaataatgggaattcctacatctgcaaatgctcagagggatttgttctagctgaggacggaagacggtgcaagaaatgcactgaaggcccaattgacctggtctttgtgatcgatggatccaagagtcttggagaagagaattttgaggtcgtgaagcagtttgtcactggaattatagattccttgacaatttcccccaaagccgctcgagtggggctgctccagtattccacacaggtccacacagagttcactctgagaaacttcaactcagccaaagacatgaaaaaagccgtggcccacatgaaatacatgggaaagggctctatgactgggctggccctgaaacacatgtttgagagaagttttacccaaggagaaggggccaggcccctttccacaagggtgcccagagcagccattgtgttcaccgacggacgggctcaggatgacgtctccgagtgggccagtaaagccaaggccaatggtatcactatgtatgctgttggggtaggaaaagccattgaggaggaactacaagagattgcctctgagcccacaaacaagcatctcttctatgccgaagacttcagcacaatggatgagataagtgaaaaactcaagaaaggcatctgtgaagctctagaagactccgatggaagacaggactctccagcaggggaactgccaaaaacggtccaacagccaacagaatctgagccagtcaccataaatatccaagacctactttcctgttctaattttgcagtgcaacacagatatctgtttgaagaagacaatcttttacggtctacacaaaagctttcccattcaacaaaaccttcaggaagccctttggaagaaaaacacgatcaatgcaaatgtgaaaaccttataatgttccagaaccttgcaaacgaagaagtaagaaaattaacacagcgcttagaagaaatgacacagagaatggaagccctggaaaatcgcctgagatacagatgaagattagaaatcgcgacacatttgtagtcattgtatcacggattacaatgaacgcagtgcagagccccaaagctcaggctattgttaaatcaataatgttgtgaagtagaacaatcagtactgagaaacctggtttgccacagaacaaagacaagaagtatacactaacttgtataaatttatctaggaaaaaaatccttcagaattctaagatgaatttaccaggtgagaatgaataagctatgcaaggtattttgtaatatactgtggacacaacttgcttctgcctcatcctgccttagtgtgcaatctcatttgactatacgataaagtttgcacagtcttacttctgtagaacactggccataggaaatgctgtttttttgtattggactttaccttgatatatgtatatggatgtatgcataaaatcataggacatatgtacttgtggaacaagttggattttttatacaatattaaaattcaccacttcagagaatggtaaaaaaaaaaaa

SEQ ID NO: 149 - DNA, 3032 bp, Homo sapiens
  CDS (79)..(2514)
ggaattcgcactgtcaagaatgagttctccctcaagaccttcaagaggaagtccgaggtggatcgtgctgtcaagaggatgcggcatctgtccacgggcaccatgaccgggctggccatccagtatgccctgaacatcgcattctcagaagcagagggggcccggcccctgaggcagaatgtgccacgggtcataatgatcgtgacagatgggagacctcaggactccgtggccgaggtggctgctaaggcacgggacacgggcatcctaatctttgccattggtgtgggccaggtagacttcaacaccttgaagtccattgggagtgagccccatgaggaccatgtcttccttgtggccaatttcagccagattgagacgctgacctccgtgttccagaagaagttgtgcacggcccacatgtgcagcaccctggagcataactgtgcccacttctgcatcaacatccctggctcatacgtctgcaggtgcaaacaaggctacattctcaactcggatcagacgacttgcagaatccaggatctgtgtgccatggaggaccacaactgtgagcagctctgtgtgaatgtgccgggctccttcgtctgccagtgctacagtggctacgccctggctgaggatgggaagaggtgtgtggctgtggactactgtgcctcagaaaaccacggatgtgaacatgagtgtgtaaatgctgatggctcctacctttgccagtgccatgaaggatttgctcttaacccagataaaaaaacgtgcacaaagatagactactgtgcctcatctaatcacggatgtcagcacgagtgtgttaacacagatgattcctattcctgccactgcctgaaaggctttaccctgaatccagataagaaaacctgcagaaggatcaactactgtgcactgaacaaaccgggctgtgagcatgagtgcgtcaacatggaggagagctactactgccgctgccaccgtggctacactctggaccccaatggcaaaacctgcagccgagtggaccactgtgcacagcaggaccatggctgtgagcagctgtgtctgaacacggaggattccttcgtctgccagtgctcagaaggcttcctcatcaacgaggacctcaagacctgctcccgggtggattactgcctgctgagtgaccatggttgtgaatactcctgtgtcaacatggacagatcctttgcctgtcagtgtcctgagggacacgtgctccgcagcgatgggaagacgtgtgcaaaattggactcttgtgctctgggggaccacggttgtgaacattcgtgtgtaagcagtgaagattcgtttgtgtgccagtgctttgaaggttatatactccgtgaagatggaaaaacctgcagaaggaaagatgtctgccaagctatagaccatggctgtgaacacatttgtgtgaacagtgacgactcatacacgtgcgagtgcttggagggattccggctcgctgaggatgggaaacgctgccgaaggaaggatgtctgcaaatcaacccaccatggctgcgaacacatttgtgttaataatgggaattcctacatctgcaaatgctcagagggatttgttctagctgaggacggaagacggtgcaagaaatgcactgaaggcccaattgacctggtctttgtgatcgatggatccaagagtcttggagaagagaattttgaggtcgtgaagcagtttgtcactggaattatagattccttgacaatttcccccaaagccgctcgagtggggctgctccagtattccacacaggtccacacagagttcactctgagaaacttcaactcagccaaagacatgaaaaaagccgtggcccacatgaaatacatgggaaagggctctatgactgggctggccctgaaacacatgtttgagagaagttttacccaaggagaaggggccaggcccctttccacaagggtgcccagagcagccattgtgttcaccgacggacgggctcaggatgacgtctccgagtgggccagtaaagccaaggccaatggtatcactatgtatgctgttggggtaggaaaagccattgaggaggaactacaagagattgcctctgagcccacaaacaagcatctcttctatgccgaagacttcagcacaatggatgagataagtgaaaaactcaagaaaggcatctgtgaagctctagaagactccgatggaagacaggactctccagcaggggaactgccaaaaacggtccaacagccaacagtgcaacacagatatctgtttgaagaagacaatcttttacggtctacacaaaagctttcccattcaacaaaaccttcaggaagccctttggaagaaaaacacgatcaatgcaaatgtgaaaaccttataatgttccagaaccttgcaaacgaagaagtaagaaaattaacacagcgcttagaagaaatgacacagagaatggaagccctggaaaatcgcctgagatacagatgaagattagaaatcgcgacacatttgtagtcattgtatcacggattacaatgaacgcagtgcagagccccaaagctcaggctattgttaaatcaataatgttgtgaagtagaacaatcagtactgagaaacctggtttgccacagaacaaagacaagaagtatacactaacttgtataaatttatctaggaaaaaaatccttcagaattctaagatgaatttaccaggtgagaatgaataagctatgcaaggtattttgtaatatactgtggacacaacttgcttctgcctcatcctgccttagtgtgcaatctcatttgactatacgataaagtttgcacagtcttacttctgtagaacactggccataggaaatgctgtttttttgtattggactttaccttgatatatgtatatggatgtatgcataaaatcataggacatatgtacttgtggaacaagttggattttttatacaatattaaaattcaccacttcagagaatggtaaaaaaaaaaaa

SEQ ID NO: 150 - DNA, 2517 bp, Homo sapiens
  CDS (1673)..(2095)
gcacgagcacaaagccagtttttcggggggatgctcagtgtctacctgcagtgccaaagttttgcttgaacagccctcttctgccgcgcctcccagctccaccccctatcaacgtgggtgctggctgcttctgcgtgaggagcttcctctgatcacctgtagcatctttagtgccttcgtccagtcggcctgcaaatcccatttcccagagaggcttgggcagggcccacttgccacttggccctgtgcccagagcgttgggggcagatggcagccaggggaagaagggaggtggggaagggccgccaccgcttgagggtcccctcccttgagaggaggccccatggcagttttcctgagttcttgatccactttggtttaaacaacttttgtgaagctatgtgagatttgactgcatttcaaaagacaaaacacatgtttttttctgatttgctctttgcctttcagcgacgctttcagatactttgtgagtgtctactctgtgctaggtgctgagtagactgggatgtgtgtggctccatccctggctggaagagctttgagtcctgtctgctgacttcactgaaggagtttctctcttgcttcattccttcctcccgggggtcagctgggtaggagcagacttgccctgccttcctctaggcagaaagttttcctgcaaatgaaagaatctgccattctcttttgctatgatgatgatgattattctgacatgacccgcgggtactgaagccacagtcctctctgttcactgttctctccttgagtcatatctatggcctgaggacgtctgtatccagctccttttcctacaatggtagacacttccccaggcagtgggtgggtcggggtggccagtcactctcctagctgtccttgcctggggacttagatttaccccatccaggactgtggtcgctattctgtgagcgattgatggcgcatatgcagaactcccctggagtcatggctctagaaagtgtccaggcccatcgtgacaatggtgccaagcaccgggctggtgaccagtgcctaaacacacacgctcccttaatccttacggcaagcctgtgaggcggataggaccagccctgatctatagtgagaaaattaaggttcagagggagaaggtccaaatagtggccaagctgggactgagatctcgagtttgggtttgtttgggttttgttgttgttgttctttccctcgtgtccatgacttttctctgccattagcagggaagtgtgcggagggcttccagggaatcaagtgaccctccctctgaatttcggtgcctcttccccccgccccttgctcacacatttcagtaggtcacaggccaaatggcagcccaaaaggtgggcagagatttttttttcttcccctcacccctgcttattaacacaattgtgacaactactttaccttacatcccagggcaaacggacagcttgcggtacctccaaaaatttggaaaaccctgagtctaagaccacctcttgataaaagaggcctttgctcacattttctgctcggaatctttctttgccattggtgggtgtatgtcgtcccagctgagactgcgggagagctgagctccagcttaaaccgcttttaatggcccttccctactgggggatcgctggagcccatgccaggttacggtagtcattttaaacctctgccacaaggccacgccatagaatcaatttccaagtcaatgttcttggccctaaaatgtttgcgcccactgaggatttcattaccaggtggaagatgggggaacatatgccacgttaaagagcaagtgctgagtgtgccaggacttgagaaggaccttaggctgaggagtggacagtctggtatttatttcgcctctcccaagtacccagcacagagtgggaaaaagaagaaactgctcctgccttccagtagctggcaacttgacatcaagaacaaaaacattcgtagctggacccccgtcctttcatcgtgcccaagtcttacatgttggcttaagctgcccccttggaggccgtacctttctctttggactgtgacagtggacacctaacagcctgagccatgtgtggctgtcttatcccccaagggttgtccaggcccgttctgcagggctgttgtgtagactgcagacatccatacctcaccacagaccaaagatgacctcgtgtcagactgtgggctgatgagaggtagagcagcatgcatcgaggcctgagggtgcagggcgccctctcttggcctggaggaattgctcctaactagagtaagtttccacgagggtcccaggcagagctgcagagctggaaccggaggctccacagtccttgcctgctcatggacctccttcagagcacctttctacagactggactgcccagctccgtggggtggcatctggtttctggtgctattctgccaagttatcgagctcctcctcatgtttcaacattccatcttcccggttctatcctc

SEQ ID NO: 151 - DNA, 748 bp, Homo sapiens
  CDS (166)..(672)
aagaattcggcacgaggctcccaagtcctggaacgggcctccccaccctccggggcaccgacactcacggagtcactccaacttctctgggtgctccgtggacgaagagcgctctaggacaagcaaggattcctcttctcctgtaaatgaccacagaggaagacaatgaatgaggtgaaagaatcccttcgcagcatcgagcagaagtacaagctcttccagcagcagcagctcaccttcaccgccgctctggagcactgcagggagaacgcccacgacaagatccggcccatctccagcattggacaggtgcagagctacatggaacactactgcaacagctccacagaccggcgggttctgctcatgttcctggacatctgttcagagctgaataagctctgccagcactttgaggccgtgcactctggcaccccagtcaccaacaacctcctggagaaatgcaaaaccctcgttagccaaagcaacgacttaagcagcctcagagcaaaataccctcatgatgtggtgaaccacctcagctgtgacgaggcccggaaccactacggcggcgtggtcagcctcatccccctcatcctagacttaatgaaagaatggatcgcccactccgagaagttgccgcgcaaggtgctgcagcacgggacgacttagcttctgtattattgttgcttcctcagggggagacagtcaagaataaaaagtattctaccacctaaaaaaaaaaaaa

SEQ ID NO: 152 - DNA, 2976 bp, Homo sapiens
  CDS (223)..(2850)
ggggtgacgcaggcgcagcgcgggctgcgcgcgctactgcccatccccggttgtcccacttttgttcgcctctcttcggtcctctactcaagagctccgtctccgtctcgccctcctcgaagtcctcgtcgcgcgcccgcgacccaggtcgccctgaaatctagcccgtccgagcgcgagtccaacggccgcggccgcaccaaggccccctcagaccgtgccatgggtgacagtgatgacgagtacgatcgaaggcgcagggacaagttcagaagagagcgcagcgactacgaccgttcccgcgagagagatgaaagacgtcgaggggacgattggaatgacagagagtgggaccgtggccgtgagcgccgtagtcggggtgaatatcgggactatgaccggaatcggcgagagcgcttctcgccacctcgccacgaactcagcccgccacagaagcgcatgaggagagactgggatgagcacagctctgacccataccacagtggctatgagatgccctatgctggggggggtgggggcccaacttatggcccccctcagccctggggccaccctgacgtccacatcatgcagcaccatgtcctgcctatccaggccaggctgggcagcattgcagagattgacctgggtgtgccgccgcccgtgatgaagaccttcaaggagtttctcctctccctggatgactcggtggatgagacggaggccgtcaagcgctataatgactacaagctggatttccggaggcaacagatgcaggatttcttcctggcgcacaaagatgaggagtggtttcggtctaagtaccacccagatgaggtggggaagcgtcggcaggaggcccggggggccctgcaaaaccgactgagggtcttcctgtccctcatggagactggctggtttgataaccttctcctggacatagacaaagctgatgccattgtcaagatgctggatgcagccgtgattaagatggaaggaggcacggagaatgatctccgcatcctggagcaggaggaggaggaggagcaggcaggaaagcctggggagcccagcaagaaagaagaaggacgggctggagcaggcctaggggacggggagcgcaaaaccaacgacaaggatgagaagaaggaagacggcaagcaggctgagaatgacagttctaatgatgacaaaacaaagaagtcggagggtgatggggacaaggaagagaagaaagaagactccgagaaggaagccaaaaagagtagcaagaagcggaaccggaagcacagtggtgacgacagctttgacgagggcagcgtgtcagagtctgagtcggagtcagagagcggccaggctgaggaggagaaggaggaggccgaagcgctcaaggagaaggagaagcccaaggaagaagaatgggagaagcccaaggacgccgcggggctggagtgcaagccgcggccgctgcataagacctgctccctcttcatgcgcaacatcgcgcccaacatctcccgggccgagatcatctccctttgtaaaaggtacccaggctttatgcgggtggcgctctcagagccccagccagagaggaggtttttccgtcgtggctgggtgaccttcgaccgcagtgttaacattaaagagatctgttggaacctgcagaacatccgtctccgggagtgtgagctgagccctggtgtgaacagggacctgacccggcgcgttcgcaacatcaacggcatcacccagcacaagcagattgtgcgcaacgacatcaagctggcggccaagctgatccacacgctggatgacaggacacagctttgggcctcagaaccagggacgcctcccctgcccacgagcctgccctcgcaaaacccgatcttgaagaatatcaccgactacctgatcgaggaagtaagcgccgaggaggaggagctgctggggagcagcgggggcgctcctcctgaggagcctcctaaggaagggaacccggcagagatcaacgtggagcgggatgagaagttgattaaggtcttggacaagctcctcctttacctgcgcatcgtgcattccttggattattacaacacctgtgagtaccccaacgaggacgagatgcccaatcgctgtgggatcatccacgttcgggggcccatgccacccaaccgcatcagtcacggggaagtgctggagtggcagaagacttttgaggagaagctcacgccgttgctgagtgtgcgggagtcactctcagaggaagaggcccagaagatggggcgcaaagacccagagcaggaagtggagaagttcgtcacctccaacacgcaggaactgggcaaggataagtggctgtgtcctctcagtggcaagaaattcaagggtcctgagtttgtgcgcaaacatatcttcaacaagcatgcagagaaaattgaggaagtgaaaaaggaagtcgcgttttttaacaacttcctcactgatgctaagcgcccagctctgcctgagatcaagccagcccagccacctggccccgcccagatactccccccaggtttgaccccaggactcccctacccacaccagactccccagggcctgatgccctatggtcagccccggcccccgatcttgggctatggagctggtgctgtccgccctgcagtccccacaggaggccctccatacccccatgccccgtatggtgctggtcgagggaactatgatgccttccgaggccagggaggttatcctgggaaacctcgcaacaggatggttcgtggagacccaagggccattgtggaatatcgggacctggatgccccagacgatgttgatttcttttgagccgtcccccgttcctcagtcctgtatcatccatacttgtactaccttgtcctatgaagctctgagaattttttgtacgatcagccttactgctaataaaagcacttccacagggaaaaaaaaaaa

SEQ ID NO: 153 - DNA, 751 bp, Homo sapiens
  CDS (320)..(484)
cttcctgaccctcaacttcagtctggctggagtcacactgggctgagggaactatggacagcaccaccacagatcacagccacttgggtggggctgaagtccccatttttttcaccactgggctatttctgtaggctgcttggtctaactcagttactccttgacctttggcaacatttctgtggcctcgttctcagggctgggaaggaattggtgccaggggaactggctctgtggaccataaaggtcacatagtgtctgctgtgtaaacaggctggggacagaggggctaaggacacctattccttccggcatagggatgtcagaccaggcgatcatggagctgaacctgcccacggggatccccattgtgtatgagctgaacaaggagctgaagcccaccaagcccatgcagttcctgggtgatgaggaaacggtgcggaaggccatggaggctgtggctgcccagggcaaggccaagtgaggggtgggcttgggcaataaaggcacctcccccaacagcctggagtccagcgcagccgtgcatgccaggctcacaccgccatcagctgtggggactccagaaccaggggtgcagccacccaccctcccccattccttactgtttttcaccagggggcaggagctaagttacccacagtgagttctttaaggacatttaagccagggttggcaacctctctaggattttttgatttaagggaaagttttggttgactcgaaatttttg

SEQ ID NO: 154 - DNA, 1871 bp, Homo sapiens
  CDS (330)..(1541)
gcgggccgccgtacgcccggggctgcggctctcccgcgtgggccgcggccgctcggctccgcgggcagccgcgccgtcctgccccgcgcgcgcgctagccgctgtcggccgcaggagccccgggaatctggaggggccgtggggcggagggaggggcctgcgggcggaaggcggacgaaaacagaacggaagacgacaaggaggagccggaagatgcggacgagaacgccgaggaggagctgctgcggggagagcctctgctgccggcggggacccatcgcgtgtgtctggttcaccctgacgtcaagtggggcccggggaagtcgcagatgactcgagccgagtggcaggtggcggaggccacagcgctggtgcacacgctggacggctggtccgtggtgcagacaatggtcgtgtccaccaaaacgccggacaggaagctcatctttggcaaagggaactttgagcacctgacagaaaagatccgagggtctccagacatcacgtgcgtcttcctgaacgtggagaggatggctgccccgaccaagaaagaactggaagccgcctggggcgtggaggtgtttgaccgcttcacggtcgtcctgcacatcttccgctgtaacgcccgcacgaaggaggcccggcttcaggtggccctggcggagatgccgctgcacaggtcgaacttgaaaagggacgtcgcccacctgtaccgaggagtcggctcgcgctacatcatggggtcaggagaatccttcatgcagctgcagcagcgtctcctgagagagaaggaggctaagatcaggaaggccttggacaggcttcgcaagaagaggcacctgctccgccggcagcggacgaggcgggagttccccgtgatctccgtggtggggtacaccaactgcggaaagaccacgctgatcaaggcactgacgggcgatgccgccatccagccacgggaccagctgtttgccacgctggacgtcacggcccacgcgggcacgctgccctcacgcatgaccgtcctgtacgtggacaccatcggcttcctctcccagctgccgcacggcctcatcgagtccttctccgccaccctggaagacgtggcccactcggatctcatcttgcacgtgagggacgtcagccaccccgaggcggagctccagaaatgcagcgttctgtccacgctgcgtggcctgcagctgcccgccccgctcctggactccatggtggaggttcacaacaaggtggacctcgtgcccgggtacagccccacggaaccgaacgtcgtgcccgtgtctgccctgcggggccacgggctccaggagctgaaagctgagctcgatgcggcggttttgaaggcgacggggagacagatcctcactctccgtgtgaggctcgcaggggcgcagctcagctggctgtataaggaggccacagttcaggaggtggacgtgatccctgaggacggggcggccgacgtgagggtcatcatcagcaactcagcctacggcaaattccggaagctctttccaggatgaacggacgcccacagaggcctgcggggtgggggcattgctgcctggggagctgaggcgttaccgctgtgttgggggcagcttggtgtcaggtgcagcagggtcctccttgtctggttctgcacccgtctcgctcccagccatttgctgggatgaccgtgcaggccggtgacacggccgcacctgccccaaagcgggccgcccgagcgtccactccaagcctgagcatccacacaattccagtgggccctcggtgcctgctgtgaactgctttccctcggaatgtttccgtaacaggacattaaacctttgattttacttcaaaaaaaaaaa

SEQ ID NO: 155 - DNA, 2046 bp, Homo sapiens
  CDS (167)..(343)
aagctggtacgcctgcaggttttggtccttaattcccgggtcgacgatttcgtcgggaagccaccccgcctctccgaggcctccctgccccgccccgtcacgcccctttcccggcgggacgctttgagccgccccgaactaagcagggcggtcgggggaggtgctaatgatgctggataactatgtaagagatttcaaagcattgattgactggattcagcttcaggaaaagctagagaagacagatgctcaaagcagaccaacatcattggcatgggaagtaaagaagatgtctccgggacgccatgtgattccaagtccatcaacagatagaaaaatgtaacatcaaatgctcgacgaagcttaaattttggaggttcaactggcacagtgccagctcctcgtctggctcccacaggtgtcagttgggctgacaaggtccaagtgcacaggctagcagtcacaggttccacatgcacgcagttgcagctggcagagtgtgaacagtattcgcacactggtgatggcagggcaatggcaacggagtccatacctgcaccggtgccagtagcagcatggtggcaaagtccatgcagctgccagaaagtgcacaagaagagtgatgctagcaatttggatatgccaaacagaagttgtaaagtgcttcctttaaatgaaagcgtgaaagttctcaacttactaaggaaaggaaagaaatcttatgctgaggttactgaaatcagtgtgttggaagttctggccagggcagtcagacaggagaaggaaataaagggcattcaattaggaaaaggggaagtcaaattgtccctgtttgccgatgacatgattgtatatctagaaaaccccatcgtctcagcccaaaatctccttaagctgataagcaacttcagcaaagtctcaggatacaaaatcagtgtacaaaaatcacaagcattcttatacaccaataacagacaaacagagagccaaatcatgagtgaactcccattcacaattgcttcaaagagaataaaatacctaggaatccaccttacaagggacgtgaaggacctcttcaaggagaactacaaaccactgctcaatgaaataaaagaggacacaaacaaatggaagaacattccatgctcatgggtaggaagaatcaatatcgtgaaaatggccatactgcccaaggtaatttatagattcaatgccatccccatcaagctgccaatgactttcttcacagaattggaaaaaactactttaaagttcatatggaaccaaaaaagagcccgcatcgccaagtcaatcctaagccaaaagaacaaagctggaggcatcacactacctgacttcaaactatactacaaggctacagtaaccaaaacagcatggtactggtaccaaaacagagttatagaccaatggaacagaacagagccctcagaaataatgccgcatatctacaactacctgatctttgacaaacctgagaaaaagaagcaatggggaaaggattccctatttaataaaaggtgctgggcaaactggctagccatatgtagaaagctgaaactggatcccttccttacaccttatacaaaaattaattcaagatggattaaagacttaaaggttagacctaaaaccataaaaaccctagaagaaaacctaggcattaccattcaggacataggcatgggcaaggacttcatgtctaaaacaccaaaagcaatggcaacaaaagccaaaattgacaaatgggatctaattaaactaaagaccttctgcacagcaaaagaaaccaccatcagacatgatgaaagtattcgaaggcacatggaacagattgaacaaagaaaagaaaaagctgctgagctaagcagtgggcgacatgcaaatactgattatgcccccaaactgaccccttatgaaagaaagaagcagtgttctctctgcaatgtcctgaccaacatcattggcatgggaagtaaagaagatgtctccgggacgccatgtgattccaagtccatcaacagatag

SEQ ID NO: 156 - DNA, 1143 bp, Homo sapiens
  CDS (433)..(801)
aaatgtccctgtctgacagctttgaagagagtagtggttctcccagcacacagctggagatctgagaatggacagactgcctcctcaagtgggtccctgacctccgagtagcctaactgggaggcaccctccagtaggggccgactgacacctcatgcgcctgggtatccctctgagacgaagcttccagaggaacaatcaggcagcaacatttgctgttcagcaatattcactgttctgcagcccaggcaaacagggtctggagtggacctccagcaaactccagcagacctgcagcagaggggcctgactgttagaaggaaaactaacaaaaggaatagcatcaatatcaacaaaaatgacgtccacacagaaaccccagaaaccccatctgcaggtcaccaacatcaaacaccaaaggcagataaatccatgaagatgaggaaaaaccagcacaaaaaggctgaaaatttcaaaaaccagaacgcctcttctcctctaaaggattacaactgctcgccagcaaaggagcaaaactggacagagaatgagtttgacaaattgacagaagtaggcttcagaagaacagacgtctctggcatggcctctagccttccatccctggaagagtggcagggctgttctgagccaatggatgattcctacctgactctcaggaaagtgacccatggagggtctgctccaccaccatcaacactgcagtcaggaccactcttgaataagggatattgcaggagtctaactgccctgaggcaggccttagaaacccatagtctatgacccagcgacattgtgcccgtgaccctcttcgctgcagggtgagtagagccacttacttgaggcttccaggctaagtgcaatgagaaagctcaagaaagggatattaagaagttacgaatgataagttaggtaaaagagagtaggtggaggctggggctctccctacatgcactggaagaagacattgttaataaagcatttaaagctctgttgaatgtcaataatacatatccttctgctatcagttagtgggggtgcgagtctttgtaggtatgagaaaaaaaatgtccaggcttgtgcacatcaaccaaaattgtttcggacgcgtgggtcgacccggga

SEQ ID NO: 157 - DNA, 1723 bp, Homo sapiens
  CDS (402)..(1334)
acaacccaattcggcacgaggggcattggaaatagcagagtgcttcgcggtaacaggggttggagtgcaatggtgtgatctcagctcactgcaacccctgcctcccaggctccagcgatcctcccacctcagcctcctgaatagctgaccaccagcacactaggcaaacccaccccactcaccgcctcccttgggaattcagacctaaccatcgctgagctgaagtacaaatgtactgaggctggagcctgtgtgaacagaacagaagaggccttcactctagtagtgctcacagtccagcagcaggtgtttgctgaagacagcttactcagatcactactgcctggaggtggttgatatatcctggtgtaaaccttcaagaagggcacaggcaggaaaacatgagccagcaactgaagaaacgggcaaagacaagacaccagaaaggcctgggtggaagagcccccagtggggctaagcccaggcaaggcaagtcaagccaagacctgcaggcggaaatagaacctgtcagcgcggtgtgggccttatgtgatggctatgtgtgctatgagcctggccctcaggctctcggaggggatgatttctcagactgttacatagaatgcgtcataaggggtgagttttctcaacccatcctggaagaggactcactttttgagtccttggaatacctaaagaaaggatcagaacaacagctttctcaaaaggttttcgaagcaagctcccttgaatgttctttggaatacatgaaaaaaggggtaaagaaagagcttccacaaaagatagttggagagaattcgcttgagtattctgagtacatgacaggcaagaagcttccgcctggaggaatacctggcattgacctatcagatcctaaacagctcgcagaatttgctagaaagaagccccccataaataaagaatatgacagtctgagcgcaatcgcttgtcctcagagtggatgcactaggaagttgaggaatagagctgccctgagaaagcatctcctcattcatggtccccgagaccacgtctgtgcggaatgtgggaaagcgttcgttgagagctcaaaactaaagagacatttcctggttcatactggagagaagccgtttcggtgcacttttgaagggtgcggaaagcgcttctctctggactttaatttgcgtacgcacgtgcgcatccacacgggggagaaacgtttcgtgtgtccctttcaaggctgcaacaggaggtttattcagtcaaataacctgaaagcccacatcctaacgcatgcaaatacgaacaagaatgaacaagagggaaagtagtcctccaacaggatgaagcagattaacagaagagtgatcagtgacaaacatgcctcattgattattgtttctaggaaggaatttttaaatcaatattgcaaccccaaaagcggttataatttggtgttactaagatgctcctacactttgtgataccgttttaaggacatggtgcatttttttttcttttatttgttttatttagaactttttttatttgttttatttagaactttgtgtgttcttaaagtgtgcttccaacaggaaggtcagtgataaattttcaaaagcataaccttcaatatattatctgttggattattggatataagacttattttcatgtactataaatatgaaaataactttgatttttaaaaaaaaaaaaa

SEQ ID NO: 158 - DNA, 2462 bp, Homo sapiens
  CDS (1)..(2310)
atgtcttcgcggacggtgctggccccgggcaacgatcggaactcggacacgcatggcaccttgggcagtggccgctcctcggacaaaggcccgtcctggtccagccgctcactgggtgcccgttgccggaactccatcgcctcctgtcccgaggagcagccccacgtgggcaactaccgcctgctgaggaccattgggaagggcaactttgccaaagtcaagctggctcggcacatcctcactggtcgggaggttgccatcaagattatcgacaaaacccagctgaatcccagcagcctgcagaagctgttccgagaagtccgcatcatgaagggcctaaaccaccccaacatcgtgaagctctttgaggtgattgagactgagaagacgctgtacctggtgatggagtacgcaagtgctggagaagtgtttgactacctcgtgtcgcatggccgcatgaaggagaaggaagctcgagccaagttccgacagattgtttcggctgtgcactattgtcaccagaaaaatattgtacacagggacctgaaggctgagaacctcttgctggatgccgaggccaacatcaagattgctgactttggcttcagcaacgagttcacgctgggatcgaagctggacacgttctgcgggagccccccatatgccgccccggagctgtttcagggcaagaagtacgacgggccggaggtggacatctggagcctgggagtcatcctgtacaccctcgtcagcggctccctgcccttcgacgggcacaacctcaaggagctgcgggagcgagtactcagagggaagtaccgggtccctttctacatgtcaacagactgtgagagcatcctgcggagatttttggtgctgaacccagctaaacgctgtactctcgagcaaatcatgaaagacaaatggatcaacatcggctatgagggtgaggagttgaagccatacacagagcccgaggaggacttcggggacaccaagagaattgaggtgatggtgggtatgggctacacacgggaagaaatcaaagagtccttgaccagccagaagtacaacgaagtgaccgccacctacctcctgctgggcaggaagactgaggagggtggggaccggggcgccccagggctggccctggcacgggtgcgggcgcccagcgacaccaccaacggaacaagttccagcaaaggcaccagccacagcaaagggcagcggagttcctcttccacctaccaccgccagcgcaggcatagcgatttctctactaatctactttctatgtcgatgaatttggctattctagacatttcaggtggcccatcccctgcacccctgcaccccaaacgcagcccgacgagcacgggggaggcggagctgaaggaggagcggctgccaggccggaaggcgagctgcagcaccgcggggagtgggagtcgagggctgcccccctccagccccatggtcagcagcgcccacaaccccaacaaggcagagatcccagagcggcggaaggacagcacgagcacccccaacaacctccctcctagcatgatgacccgcagaaacacctacgtttgcacagaacgcccgggggctgagcgcccgtcactgttgccaaatgggaaagaaaacagctcaggcaccccacgggtgccccctgcctccccctccagtcacagcctggcacccccatcaggggagcggagccgcctggcacgcggttccaccatccgcagcaccttccatggtggccaggtccgggaccggcgggcagggggtgggggtggtgggggtgtgcagaatgggccccctgcctctcccacactggcccatgaggctgcacccctgcccgccgggcggccccgccccaccaccaacctcttcaccaagctgacctccaaactgacccgaagggtcgcagacgaacctgagagaatcgggggacctgaggtcacaagttgccatctaccttgggatcaaacggaaaccgccccccggctgctccgattcccctggagtgtgaagctgaccagctcgcgccctcctgaggccctgatggcagctctgcgccaggccacagcagccgcccgctgccgctgccgccagccacagccgttcctgctggcctgcctgcacgggggtgcgggcgggcccgagcccctgtcccacttcgaagtggaggtctgccagctgccccggccaggcttgcggggagttctcttccgccgtgtggcgggcaccgccctggccttccgcaccctcgtcacccgcatctccaacgacctcgagctctgagccaccacggtcccagggcccttactcttcctctcccttgtcgccttcacttctacaggaggggaaggggccagggaggggattctccctttatcatcacctcagtttccctgaattatatttgggggcaaagattgaaaaaaaaaaaaaaa

SEQ ID NO: 159 - DNA, 799 bp, Homo sapiens
  CDS (257)..(733)
gcgctgcaggaattcggcacgaggtggggcctaagactctcgcgagacaccgtctagcacttcccgcccgtcagtccttcacagtgcccgaatcgcccgctggtttaagtgcagcctgtcaatcagagcagctctcgaggccccgcccaaggccgtgctgcgtttctccttacgtcacttcctctccagcccctgcgtaatcgataaggaaacccggacgctgctgcccctttttttttttcaggcggccgggaagatggcggacattcagactgagcgtgcctaccaaaagcagccgaccatctttcaaaacaagaagagggtcctgctgggagaaactggcaaggagaagctcccgcggtactacaagaacatcggtctgggcttcaagacacccaaggaggctattgagggcacctacattgacaagaaatgccccttcactggtaatgtgtccattcgagggcggatcctctctggcgtggtgaccaagatgaagatgcagaggaccattgtcatccgccgagactatctgcactacatccgcaagtacaaccgcttcgagaagcgccacaagaacatgtctgtacacctgtccccctgcttcagggacgtccagatcggtgacatcgtcacagtgggcgagtgccggcctctgagcaagacagtgcgcttcaacgtgctcaaggtcaccaaggctgccggcaccaagaagcagttccagaagttctgaggctggacatcggcccgctccccacaatgaaataaagttattttctcattcccaaaaaaaaaaaaa

SEQ ID NO: 160 - DNA, 1630 bp, Homo sapiens
  CDS (638)..(826)
gtttcaagaagtttagaatttcacatacttcatgctagagagggaaacagaattctagttgctagaaaagatcaaggttgctatttgttcctttgaagttaactgtctacccatctccgagggctgcatggggctttttgttaagatgtatttccagtcaccccaagccagaacccatcaacagcatccagttggacaacctgtgtatgtttcaggcagagtgtttctgagttgagaatgttttctccttaagttggaatagaaagcattagtgctgaaataaccttcaataaatcaccgttgtattattgcatataagcgatgtgtttaaatttagcaggctgctttctcctgatgaaaaccatttgtgacaacatgtcagttgtttctttggtgatttgtgtcacaggctttctttacagatgcggtgtaaatgaaatttttaacggggttcaaaatcagatggctaaatgtgttaatattctcatttaaacccaactacctttcttcgtctccaagcccctataatttaactctgaactataatcttttccattctatctagctcccatcctaagtcctctcctcctaacgtggaactctcctaaaatcttctccttatactagggttcgagacatgaggctgtctttttgggccttttgcgttgtcacagtcccagaccacggaacattctctcttccccaggacaggacattctctcttccccagcctccttcctgtcctggcgttgagtcttccaaatggaaaattccagccatatcaattggtgatgcacccatttcttcctgtggaacgacagtctgatggaattgcttctggagtaaatgcccagcttcttaccacttcagtgtcagcctgaatgtttggaaagttctagcacctcaaaccatttgcatctatgaaagcagaactctattttttccctttggtttagcttgtgagttctctgtgggaggaagatctgatatggccggctctctttcaaccctagttccagcagagagagagagagaatgttctgggtgacggaccctcccagcaaaggggcttgctttatttgcttctctccccaaccctccactcttagcctttgtcttttgaataatccttcctcattccacttttgtggtgggggataattagtcacaactcagtagtaagccgtgcctgctgtagagaggaagcattcagggggttggaagtgtggagaccccagtctgattgctggaatcagtgctcctcggttcagtgttttgagaccaggtctttagcttctagctgggcatatttttctgctttgtaatttaacctgtatcttttttttcccatgttcctgcctcatcagggaattgtaagatttagggggaggtgtgggaaatcttactctttgccctaaagtattcagcgatcagaattctggataccctgcaaaacacctccaacctccctgcctttgaaccctgtgttaacaatgagaagcttgtttatttgaaggctgggttctcattggcccacaggggtaggttgtaattgtgtgtctaaaaaattgccttttgcattccccaatagcatgacaactggaatagtaatttgacttaaaaaaaaaaa

SEQ ID NO: 161 - DNA, 425 bp, Homo sapiens
  CDS (97)..(396)
agggggcacggaggtttgcgcgccttggtgagccgttggcgtggtggtcccggagtgatcctggcagccgggggggaagacaaggagggtttgagcatggcagaaggaaacaccctgatatcagtggattatgaaatttttgggaaggtgcaaggggtgtttttccgtaagcatactcaggctgagggtaaaaagctgggattggtaggctgggtccagaacactgaccggggcacagtgcaaggacaattgcaaggtcccatctccaaggtgcgtcatatgcaggaatggcttgaaacaagaggaagtcctaaatcacacatcgacaaagcaaacttcaacaatgaaaaagtcatcttgaagttggattactcagacttccaaattgtaaaataatggcctgaatttaagttttctaagataag

SEQ ID NO: 162 - DNA, 3519 bp, Homo sapiens
  CDS (56)..(2926)
tttcgtggagactagcttccgcttccggtgtgagcggcccggccgggggggcaagatggcggcggcagtaggggttcgtggccggtacgagctgccgccttgctccggcccaggctggctcctcagcctttccgccttgctgagtgtggcggcacgaggggccttcgccaccacgcactgggtcgtcacggaggacgggaaaatccagcagcaggtggattcaccaatgaacttgaagcatcctcatgacctagtcatattaatgagacaagaagcaacagttaactacctcaaagaattagagaaacaattagttgctcaaaaaattcacatagaagagaatgaggacagagacacaggactggaacagagacataataaagaagacccagactgcatcaaagccaaggtgcccttaggggacctggatctatatgatggcacatacataactttggagagcaaagacatcagtcctgaagattatatagacacagaatctcctgtccctccagacccagagcaacctgattgtactaaaattctagaacttccatatagtatacatgcttttcagcacttgagaggtgtacaggagagagttaatctttctgcacctctgctacctaaagaagacccaatcttcacatatttatctaaacggttaggaaggagtatagatgacataggtcacctcattcatgaaggcctacagaagaacacttcctcgtgggtactgtataacatggcttcattttactggagaattaagaatgagccatatcaggtagtagaatgtgccatgcgagcacttcacttctcttccaggcacaataaagacattgccctggtcaacctggcaaacgttctacacagagcacacttctctgctgatgctgctgtcgtggtccatgcagctctggatgacagtgacttcttcaccagctattacactttggggaatatatatgcaatgcttggggaatataaccactcagtgctctgttatgaccacgctttgcaggccagacctgggtttgggcaagctataaagaggaagcatgctgtcctatgtcagcaaaaactggagcagaaattggaggctcagcatagatctctccagcgaacactgaatgagttaaaagagtatcaaaagcagcatgaccactacctgagacagcaggaaatcctagaaaaacataaactgattcaggaggagcaaatcttaagaaatatcattcatgagactcagatggcaaaagaggcacaattaggaaatcatcagatatgccgactggtcaaccagcagcatagtttacattgccagtgggaccagcctgtacgctatcatcgtggagatatctttgaaaatgtggactatgttcagtttggtgaggattcatcaacctccagtatgatgtctgtgaactttgatgttcaatcaaatcagagtgatatcaatgattcggtcaagtcttctcccgtagcccattctattctctggatttggggcagggactctgatgcatatagggacaaacagcatattctatggcctaaaagagcagattgtacagaaagctaccctagagtccctgttggtggggaattgccaacgtattttctgcctccggaaaacaaaggactcaggatccacgaactcagcagtgatgattattctacagaagaagaggcccaaacccctgactgttccataactgacttcagaaaaagccacactctgtcctacttagtcaaagaattagaggttcgcatggatctgaaagccaaaatgccagatgaccatgcacgaaaaattttgctttcccgtattaataactatactatcccagaagaagaaattgggtctttcttatttcatgctattaataagccaaatgctcctatctggctcatactcaatgaagctggactatactggagagcagtaggaaatagcacttttgctattgcctgtcttcagagggctttgaatttagctccacttcaataccaagatgttcctcttgtcaacttggccaaccttttgattcattacggccttcatcttgatgccactaagctgctacttcaagctttggccatcaatagctctgagcctctgacctttttgagcctgggaaatgcttaccttgctctgaagaatatcagtggggcacttgaggcctttagacaggccttgaaattaaccaccaaatgtccagagtgtgaaaacagcctgaagttgatccgctgtatgcagttttatccttttctgtacaacatcacttcttctgtttgcagtggtaattgtcatgagaaaaccctggacaacagccatgacaaacagaaatattttgacaactcacagtcactggatgctgctgaagaagagccctctgagagaggaacagaggaggaccctgtattctctgttgagaattcagggagggactcagatgcccttagacttgaaagtacggtggttgaggagagcaatggttctgatgagatggagaattcagatgaaaccaaaatgtcagaagaaatactggctttggtggatgaatttcaacaggcatggcctttggaaggctttgggggtgcactagagatgaaagggcggcgtctagacttacaaggaatacgggtgctgaagaaaggtccccaggatggagtggccagaagctcttgctatggagactgcagaagtgaagatgatgaagcaacagaatggattacattccaggtcaaacgtgtaaagaaacccaaaggagatcataagaaaactcctgggaaaaaagtagaaacaggtcagatagaaaatggacatcgttaccaagcaaacctagagatcactggccccaaggtggcatctcctgggccacaagggctactagactggaagaccaggaaagtgccatagacataatgtaactggatttcagcaaggcatttaacagagcctcttatgatatccttgtgaaccagatggagagatgtgggcttgaagccttcccattgcctacaggataaaattcaaacttcctagtgtggtgtacaagaccctttacagcccgcctctgtgtacccttcaacaccattctctgaaccaaccatgctcatgtttttacctcagtgcctttgcacatgctattccctctgcctggaatgccctgtgccccctctgccctctggccgtgctaaaatatcactcatccttaaacttcaaaatcaagtgccatctcttccttgttaccttcaggcagaattagttactctttcctctgtgcaattgttctatatcttcgctctagctcttttcctgttgtattgtaatgatttgtttatgtttaccttccttactagactgtgagctcaagagcaggccgtcttaattattcctttctgtacccctagtgtcttttatggttctcagccccttataacaggtgctcaataaatatttttcaaatccaattattaaatgtaaaagaaaattaataaaaaaaaaaaaaa

SEQ ID NO: 163 - DNA, 463 bp, Homo sapiens
  CDS (178)..(435)
gggactcatgagagtcatcggtgttgtgtgaggcagctgtttgttgattttctggaccaaataatgttccaccgtgtgactggacataccttagtctatccattctaccactgatgagcatgtaagctgttactatttttaactattacaaattatcttgctaacacatttttgtgcatgtcttttggtgaccaaatggactcatttctctcaggtatgtatctcagagtgaaactgttttatcacagtgtatgctttacatttagtgctttccaattcctgattaagaaatctttgcctgctcctaaggatgtaaaattattctcttatggcctggctcagtggctcatgcctgtaatcccagcattttgggaggccaaggtgggaggattgcttgaggcaaggagttcaagaccagcctgggcaacatactgagaccctcatctctacaaaaaaaaaaaaa

SEQ ID NO: 164 - DNA, 7666 bp, Homo sapiens
  CDS (632)..(1552)
caagagtgcctgaggctggatcagaaatagccacgatcgtccagtttgattgattgattgattgatttagttgtgatggagtctcgctgtatttcccaggctggagtgcagaggcacgatctccgttcactgcagcctccacctccccggttcaagtgattctcctgcctcagccttccgagtagctgggattacaggcacctgccaccacgcccggctgatttttgtgtttttagtagagacagggtttcgccatgttggccaggctggtcttgaactcctgacctcaggtgagccacccgcctcggcctcccaaagtgttgggattacaggcgtgagccactgcccccagccccagcttgatcttgaacctcctgtgtgtgggcagagagacatggccctgctactgcttgaacggcttccggagacagtgacttgtttcctttttccctctgaactatgccgtagggccaggtgagctgctgtgaaggactcattcttggtagccggcagttactggcaacttgtgagcttggtgggctcctactaacgcacctgggacaccaggctgctgggctcccctctaggcagcctcccctccaggcagcctcaccagcagctcccctgagccatggagaccccagaggtccccgtgggctcgctaatcgactttgggcctgaggcacccacctcttctcccctggaggcaccaccccctgtgctgcaggacggcgatggctccctgggggacggtgcatcagagagtgagaccactgagtctgcggacagtgagaatgacatgggcgagtcgccctcgcacccgtcctgggaccaagaccgccgttcctcctccaacgagtccttctcctccaaccagagcaccgagtctacccaggatgaagagaccctggcactcagggacttcatgcgtggctacgtggagaagatcttctctggaggggaggacttggatcaggaggagaaagccaagtttggagagtactgcagcagtgaaaatggaaaaggccgggagtggtttgctcgatacgtgagtgcccagcgctgcaactccaagtgtgtctcagaggcaaccttctaccgcctggtgcagtcttttgcagtggtgctgttcgagtgtcatcagatggatgactttgggcctgccaagaacctcatgaccatgtgcttcacctactaccacatcggaaaaccacagctgctgcccccggagtcccgggagaagcccgcgggcagcatcgactcctacctgaaatccgcaaacagctggctggccgaaaagaaggacatcgccgagcggctgctgaagaacacctcggccaggactgagaatgtcaagggcttcttcggggggctggagaccaagctgaaggggcccctggccaggaggaacgaggaagacgagaacaaaccccaggagaagcggcccagggctgtgaccgcgtacagccccgaggacgaaaagaagggggagaagatctacctgtacacgcacctgaagcaacagcccatctggcacactctgaggttctgagaagtggtgccacatgacccaggaggagcgcgacgacagcctccggttcaacgagaacatcaccttcgggcagctgggcacattcacgcacaacatgctggcctttggactgaacaagaagctgtgcaatgacttcctgaagaagcaggctgtgattggcaacctggatgaagagcaatacaagctgcttagtgaccacattgagcaaatggccactgagtaggccccagaggtcgcactccgcaggaggactgaggccatgtgccattctcccgggcccagcgcccggccgtcaccccacccgatgacctgcatgaagccagcagcacccagagccactcctgctgccctagaactagcggttagaagaatccgctgttcctccctcatctcctctgcctgtgtctgcgacccccatccatgtgccaaagtgtcccttgggtcacacagctaaagccgaggtgaccagttgtaccccgagtgccaggcttgtgagatgagaccaagagggaggaggggaaggactccatgggccatcgtgggccaagggctggcgagggtgggggtgggcaagggatgcaggcaggacagccatgaggtggggctgcagccggcacacccagtggtggagggccggcgctgccactcacggtgggtggccgtgggccaccttccctgcaatgggtgcacacgcggctcccatccagccctctcagcgtggggctgtggctggtcctcactattccccagtctcccgctgtggggcaggaacaggaagtgacgggaaccttgaggaggaaacgcctgtgttagggagagagtgggtgcggtgtagaggatgctcttggccggctggagcaagacctggctcccaccagagggacgtgtgtgtgcctgcagacggcccgggagctgtgtgtctccgccagagtcacagcagtgccgaggtgtccgcggcagaccacacagaccgtctgaaatgcgcccgcctggcggacagctcccttctgaagcagagaagcctccatggtcacgaagcagcgttgtgctgtgtgtccctcgcaagaagcacaggaaagagaagtttctttagtagccactagacaaccaccctttctgaaagcaaacagtgctgctctttattccagacaaggcaggaaagtctgagttgggagtgacagtggctggagagaagcagatctgtgcaacgtgcagggcaagccagtggcgtggcctctgcctctaagcgctgagcattgggccccttccccaccagacctttgtagctcctccagcctctgcagagactcccttcacctcgcacttactgcctgggaaccacggcccttctcttctgtgggtctgcaccaggtactccaggccagcccatgggcccggggcctgaccccaacacctgcatgctgggtccagagccttctgtttcaccgtgcgtggacactgctaggccgcctggggtcccctgcctcctgcctgtcgctgccgtggtccctgactgcgaaataggcccgcggggctctccctcctcctgccatcctcccctcccgcccttcctggctacctcctctgacatgcggtcagataagtcccgtcttgtttgtgagtaccacagaaacgcctgagagtcacttacccggccactgcttggaaggtttccctccggggaatgcctccctggaatgttccagagacggaacattctctagagacaacagtctgtgctgcagattggttggatcacagaatgtgtgtctggggcattatctgaaacgtggtgtcatctgatgcatttggaccatatgctgccagactgcagaacgggggagccggggctcagggcccctgactgcatggtgcatgagtgatctcagcctagcgatgccgctggccagaccgtgaccatgctgccagtgtgctcgccatgagctgggtcagggctggggagttgtgcaggctggggtgacccttcccccatcattgggccccaacgggcatgtctccaccgaatccatttagagaaatgtcagagcgaggggtgtgtggacacccctcgctctgatgccaactgcagataatacacacctcctgcagcgtccagccacggctccagggcactgctctcctccttgcaccggtgaaactcaggccacactcaagggctgactgtccaggcgctcccttcagccgcctcgtcgtcagcgttcttagtcatgcattattcgtgttagctgaaatgcattcagactttgttctgcggtgcccacaggacttacccctgtatgtacaggatttttgtatgaaagttttgtttgattctgagactctcttgggaacgctggagagcttgtgcacagcctctggaaggaaaggcagcgctgacttcgttgggcttttttccaagcactttaacttcagaaatggtcttgacacttttttctccacatagactcttgaaatagccatttcaggggaggaaagggttggggttttctttgtttgtttgtttgtttccccctttactacctgttcttgtagatctagctcctcagagttggaggaaggctgacagagaaggtctcctctgtgctccatccacacaggatgccggagagacagccccttgtgctgtgagcagagcaggcagtggctctggaggctgcctgtggtctccttccagctgtggctgacagtggctctggccagggttgcttggagaaggctcagtgtgcctgggacagggcttaccacctgccaccaaggtttcctctcttcccccaggacctgggcagagcaggcatgagctgggctgtggtgcagagcaagcagacccagccacactgctcaaaggtccctgcgtggggaggtgtcacaccaggggcacacccagggccacctgggtgtaggagagctctggtggcccctccgtaaactcaggaagtgtcaggtgatttcctagggagaggttcccagtcccagcaggcagaatgcccaaaaccaggagcacgaaggcctgtcatccatggggccattgcaggcaccctgccgcccgaccttgagggctgtgccaatcctagtgaaccaaaatgcaaacaactcacacaagtgaaaagctccctgctttgaaaacaggacatgttgacaggcagcatggtatgtttttagcctttgttacagttttagcaacattgatgtctaagaggggccgtggtaatagattgcatctgccctgtgcatgcgcatgtttaaccacaggccagagaactcaattctgatgtcgtaagttctctgtaagtgaaatggggtagactgtatgattttcctattgccaaaagaaagaaagggggccaaacagctctgaaatttccaaaaaatggctagagggagagtccagtttctgagctctgtacccaaattaaaatcctgatgttcaggttaatccaagcaacacgcattgggtttaaaaccagcaccgaggcccagtgggggaatcacagacatcaccaagtctcgtcttctttccttcctgtgagttgaaaccaaacaggcctctcgctcactcctcccagcccagtaatgctgaggagttcagttgtgaggaaagaaggctggagctgtgagattcgcttttccctaggctgttccgcgtgggttaccttatcaccctggagcacttggtattccagacccctgacatgaggaatgcaggttcacactgtaaagagtttgtgaaaggtttcagtctaactggggttccttagctggaagccagggctggaagctacaggcctgaccttcctgggtcccactatctgttggcattttttttttttttttttagacggagttttgctcttgttgcccaggctggagtgcagtgacacaatctctactcactgcaacctccacctcccgggttcaagcaattctcctgcctcagcctcctgagtagctgggatgacaggtgcacgccaccacgcccggctaatttttatatttttggtagagatggggtttcaccatgctggccaggctggtctcgaactcctgacctcaggtgatcccccccacctcagcctcccaaagtgctgggattacaggcgtgaggcatcacacctgcctctgttggctttttagttaggaaggatccagctaggcccgtgtggttagatcagctttgttactgaattacctaaaaccagaccacagcacagccagggagcccagtagtgtttccaagaacagtgtggagcttgagaaagagaactttaaaaattagagggtccctttctgcagaggaagggatgctcgcagggtggcagtggcccagccccagcctcagggacggggagggagagccccctctgggcccagcaggcaggtgttctgaggctggtccctcctcagtttccgcagccacaaggcgaaacggccagattctcactcaaggtcgttctcactccttttcctgtcccgtttccagtcccactgagccattcacttctgctgaaccatttttcttaggatgcagccgtctcactcccttgtcctgtaaatcgtgtattcatgttgatgattcttggagataggtttcactttttcccagctgcgtccacaggaaaggggagtcggatgccagctgcaccccgcctggctcgcacaggctaagaccacagacagagcagggcttcccggagccacacaggccacgcaccccaggaacccttgctgctgcgggccaggaacaggaatgtgttggtgcctgagacaccaaatggaagaagcacatcaagactgttctcctgcggccaacactggcccggaagccgccctccatacaggccctcagggggcctgccttctgcgcctcagtcccccgtgcatccctgggcctgggtatcacatgctctccaggaaagggacggaatcaatcgtgtgaccgatgggctcgcaaggatgggtgccgccgtgggagccctgcctctggtgctggcaagggattgggtttgtgtgggtgtctctagcctgcagagtgcagtgagtgagagtccttgggagcgcggcgctgcctgtagctgcgcctggggatgcacgtggccacgggatttcagtgggacagcgctcccacaggggctgggggtgggggtggggtttcttagttactgttggaaagggaaaaattcaccatatccaaggggagagacgatgggctgggtttgtttactccaacttcccttctacacccctcctgcagaacagtacgatttggggagaacccagctccccactttatctgcagactctgggacctgacaaaacagtcagagcctgagtgcactgcagcctgaactcccttgagcagcgctataagggactttgcactttaaaaaggggatgcctgtcagtaaatcccctgtgcattgactagaactggggggctgcgcccgctccctccttaatcctagatgatttgctcatgaaatagaggtgggggacgaccgcatgcactctgggaggtgcagccctaaggggtggactccagatctccctgcaagagacagcttggcttggctttggctgttggggaggagtccctgccatcccggtgagcctggggctgttgcttagggtcttctgggtggacacgtggagaaagagaaggcaaacgttggaacactaggaaaagctagaaattcagacaacacacatggatccccttaaaacatgtaaatgtgtcagaacacggttgacctgccgccttcttgaacctggtggcccccgttggaactatcagtggcgtctcccatgcacacgccctctgctttctctttcctagactcgcggtgctcacatccagacattaccttgttggtagcccccaagtggcgtgcagtgacaccagtatcttctctgttgcatttttgcaatcttgtgtcccgctcggtgatgttctacaaactctgttttaaggttgagaaagtttcaagggtgaagatctcaaaacagtgctaaaatcaaaggtgtttgctgtgaagaaaaacatgtgtatatattgcaccttgagttgtcagaaggtagaaactgaaataaactaacttt

SEQ ID NO: 165 - DNA, 1280 bp, Homo sapiens
  CDS (203)..(1174)
gtaaggaatcatggtcaggagtcatgaaaaaaatgccaacacactgagatggccacacatcttcactcttgcactagtttttggggttatcttctgctatcctgtcttgaagctctttttcagctagataccttgacttttctgaaaaactaaaaccagaagcatttcacgaagctaagcacaggacagaaggtttgctgggatgggaaacctgctcaaagtccttaccagggaaattgaaaactatccacactttttcctggattttgaaaatgctcagcctacagaaggagagagagaaatctggaaccagatcagcgccgtccttcaggattctgagagcatccttgcagacctgcaggcttacaaaggcgcaggcctagagatccgagatgcaattcaaaatcccaatgacattcagcttcaagaaaaagcttggaatgcggtgtgccctcttgttgtgaggctaaagagattttacgagttttccattagactagaaaaagctcttcagagtttattggaatctctgacttgtccaccctacacaccaacccaacacctggaaagggaacaggccctggcaaaggagtttgccgaaattttacattttacccttcgattcgatgagctgaagatgaggaacccggctattcagaatgacttcagctactacagaagaacaatcagtcgcaaccgcatcaacaacatgcacctagacattgagaatgaagtcaataatgagatggccaatcgaatgtccctcttctatgcagaagccacgccaatgctgaaaacccttagcaatgccacaatgcactttgtctctgaaaacaaaactttgccaatagagaacaccacagactgcctcagcacaatgacaagtgtctgtaaagtcatgctggaaactccggagtacagaagtaggtttacgagtgaagagaccctgatgttctgcatgagggtgatggtgggagtcatcatcctctatgaccatgtccaccctgtgggagctttctgcaagacatccaagatcgatatgaaaggctgcataaaagttttgaaggagcaggccccagacagtgtggaggggctgctaaatgccctcaggttcactacaaagcacttgaacgatgaatcaacttccaaacagattcgagcaatgcttcagtagagctctgctcaaagaagaggatctatgtgctgacctcagaagatgtatatgtttacataatttaatacagattgatgttaatacttgtgtatttaaaaaaaaaaaa

SEQ ID NO: 166 - DNA, 2038 bp, Homo sapiens
  CDS (669)..(929)
tacctatcgacccagcttgcacgaggcgtgtgaaaaaaaaactgtgctacttacaatctatgaaagctggtattatcccacttggcaggtaaggaaactgaggtcctgtgagtgaagtgacctcatgatcacacaacaggagatggcagggctgggattcaaacccgggagtgtctgctgccacatcccacactcccactgcctggctccaagtcccaggaagctcgagactgtgagttttctcccttgaaactcacctggagagaggccgggcacctgtgcctatgtggagggttccagccccagccaggcccctccgctgcccacaccctgggaggagaagcggcctcccttccaggctcatctgctcactgccggcattctcctggcagagctgaggtctgagagatctggactccaacccaagggccctctcttgttattcaggggtgtccacagttagggagggacctggggccttgtcccaccaccttcctaggccccgtgatcaccaccccctcaagcggggccccagccccctgagcaccccctcacgtgacccagccctcggctgttccaggctcactgcccatggtgtgctcttctgggccacagcagccagggctccagggcgaggacgggggacacctgaaaacaccccgttgttcatggtcttgtgcccattcattcggagactcctgaaaaactgggctgtttgcaaagcaaatccagctccttgtcctagcaggttctcagaacggggagtcccctgggatggagctgctcccctcacggcagcaccacgtttccagtccctcgatgccactaatcagcatggactgtgttcaggacacagggtgaacttttctctgacccccggtgctggtcctgtgccagcacgtagtagttactcagtagaggtttgctgagtaaaccagaaatcagattatgagtgttcaggggtttgataaaacagcaccacataacgcacacaaagatactccagaaacatttgctgagtacctagtacgtgtgaggtgctgtgaggatagagcagagaggactgtgccccagctgtgatgctggcagaggtgacactaagagggaaatgagatatttggggcagaatccactgggctctcttggccatccgctgccttgggtctgttgaggtgggtgcccaaaggctgccttcttgaccagaacctgctgtgcgcttcacagaacctcctcttcattggaaatgctgggcacattgcagtcagtgagctgctgccaaaacggcgttaagtagaacccccagaggccccgccggttggtgatcaccctcaggtcctgccagggagacacagtgaggaggttggctaattgctgctttcaggccctggaaatcagtcgccaaggcccaggagaaccccggtgagtccgtccagttgaggcagaggcaataacctcccattgctcggccctgcgcctgccccagtcctggcagggggcaccggctcaggaacatgcggcctcctggcatttctcggtatttaactgtctcgctgtcttatccgagtccctaatgaaacgacttgtgtgacaatctgtctgtgccttacgaaagtgtctgtgcactttttatcctttttaaaagcaacttttaaaagtggatggggaggggggctagcatacgtggtagggttctagaaatctgtggtcatcgctgaaatcctttttgcatcatgttttttgatgttggagtgatgaagtgtacatcccccaccccacacaccactacctgtgtacagaccttttaaaacatgtcttctttttctgattcaatactgtgacctctccgatacagtctaatccttggggatctgtaatcaaggttttaaaacctgggaagtgggttgggaagggtttgcactggtcttgagtgttgtgcttttctgtgttgtgtgttttgatttttgtctttttatctgttttatattgacataattttcctgtttaaaaaaatacaactttggcttgttaaaaaaaaaaa

SEQ ID NO: 167 - DNA, 1486 bp, Homo sapiens
  CDS (692)..(1255)
atgtcagcagtgtgctggctctttggacgtcacctttatgacactctgcagtatcccatcgggctgatcgcctccagctggggcgggacacccattgaagcctggtcatctggacggtcactgaaagcctgtggggtccctaaacaagggtacttgctaaagaagctcctccagcttcaggctctaactgaaggggaagtacaggctgcagctccttcccacagttccagtttgcccctgacttatggtgtggccagctctgtgggaactatacagggagctgggcctatttcagggcccagcactggggctgaggaaccatttgggaagaaaactaagaaggagaaaaaagaaaaaggcaaagagaacaacaaactggaagttctgaagaaaacatgcaagaaaaagaaaatggcgggaggtgctcgcaagctggttcagcccattgccctggatccctcaggacggcctgtgttccccatcggactagggggtctaacagtatatagcctgggggagccccaaagtggttctaaaggctaccacaggaaactggacttctaaattcttcagtgacctcaatcccaggttgggggaatgttttttatagatcatcaccgaccgacctggctttcatgatgagagtgccatctaccccgtgggctattgcagtactcgaatatatgccagcatgaagtgcccagaccagaagtgtctatatacctgtcagatcaaggatggtggtgtgcagcctcagtttgaaattgttcctgaagatgacccccagaatgccattgtcagctcttctgcagatgcttgtcatgcagaactgctcaggactataagcactactatggggaaactaatgcctaacctgcttccagctggagctgacttttttggattttctcatccagccatccacaacctgatccagagctgtccaggagctcgaaaatgcatcaattaccagtgggtgaaatttgatgtgtgcaaacctggagatgggcagctacctgaggggctgccggagaatgatgcagctatgagctttgaagcctttcagagacagatctttgatgaagatcagaatgatccccttctgccaggatccttggacctcccagagcttcagcctgcagcctttgtgtcttcttaccagcccatgtacctgacacatgaacccttggtagatactcacctgcagcacttgaagtctccatcacagggtagcccaattcagtcttcagattgaacaagaagggatcagatgccacatcgtttttgtcgtgattaatttaacttaaactaaaattttgggtatatgaaagaaggcagcaattcagaagtaaagaagatactaacgtatttcatcatggaaggtcctgtggtgatggttttccctgggaaaaccttcagctgctttatttttagtaataaatttctcttgtcaattctgtttactttcatcttgtaaaaaaaaaaa

SEQ ID NO: 168 - DNA, 357 bp, Homo sapiens
  CDS (19)..(222)
tctaagcagatgtaggtgatgagcggcccggcagccaccacgtttcattggaaaaagtgcagattggatttgccagggcatgtagctctccaggcttgcaagcgattaccagatgaacacaatcacgtacagaagaaaacctttaccaaatggataaatgctcgattttcaaaggtaactgagactttcaaaaacttcgatggttcagatgcggcattctgattgaaggagtttggttggaagtgcagtgaattttccccaggaaatgtcacctagccgaagtcttctgagtatgcagatacatttgttgttcctttattctgtcctaaaatatgtttaaacggaaattctcatgcc

SEQ ID NO: 169 - DNA, 3092 bp, Homo sapiens
  CDS (1)..(2943)
atggagattgtaactgaggaaaaaggagagttagtgttacacagatattatttatctaaaaaatcacaaccggaaaaagtctggcttgatcaaaaggaagatgataaaaaatacatgaagagggtacactctcctacaaaaccagccagttactcagtaaagtggacgatagaagaaaaagagctgtttgaacaagggctgcctggggcaatttataggtatcggcagaagaggtctgggcagtatggcttgctgcccagcaggacattgataagatgttcccatgatgaggcagttctggcccttgttccggcgggatgtcgttgtggtgttcaggctaaatttggccgaagatggaccaaaatttcaaagctaattggaagccgcactgttttacaagtgaagagttatgcaagacagtattttaaaaataaggtcaaatgcggtctggataaagaaacaccaaatcagaagaccggccataatcttcaagttaaaaatgaagataaagggacaaaggcatggacaccatcatgtttaaggggacgtgctgatcccaacttgaatgctgtaaaaattgaaaagttatctgatgatgaagaagtagacatcacagatgaggtggacgagttgtcttctcaaacaccccagaagaattctagcagtgatctcttgttagactttcctaatagtaaaatgcatgaaaccaatcaaggagaattcattgcttctgacagccaggaagctctcttttctaagtcttccaggggctgtcttcaaaatgaaaagcaagatgaaacactttcaagctcagaaattacactgtggactgagaaacagagcaatggtgacaaaaaatcaattgaattaaatgaccagaaatttaatgaattgattaaaaactgcaacaagcatgatggaaggggaataatagttgatgccaggcagttgccttctccagagccttgtgaaattcagaaaaatttgaatgataatgaaatgctttttcattcttgccaaatggtagaggaaagccatgaggaagaagagcttaagccaccagaacaggaaatagaaatagatagaaatatcattcaagaagaagaaaaacaagcaattcctgagttttttgaggggcgccaagctaaaacaccagaacgctatttgaaaattagaaattatattttggatcaatgggagatatgcaaaccaaaatacttaaataagacctcagtacgtcctggcctgaagaactgtggagatgttaattgtattggacggattcatacatacctcgaattgataggagcaatcaattttggatgtgaacaggctgtgtataataggccacaaacagttgacaaagtacgaatcagagacagaaaagatgcagtagaagcataccaacttgcccagcgtctgcagtctatgcgtacaaggagacgtagggtccgagacccatggggaaactggtgtgatgcaaaggacttagaaggacaaacgtttgaggagccatttcaggtgaaagtggcttcagaagcacttttaataatggatttgcatgctcatgtttctatggcagaagtgattggtctgttaggaggaagatactcagaagttgataaagtagttgaagtctgtgcagcagaaccatgtaacagtctgagtacaggactacagtgtgagatggatcctgtatcacaaacacaggcctcagaaaccttggctgttagaggcttcagtgttattggatggtatcattctcatcctgcttttgatcctaatccttccttacgagatattgacacacaagctaaataccagagttacttctccagaggaggtgcaaagttcattgggatgattgttagtccctataatcgaaataatcccttaccatattctcagattacctgcctggttataagtgaggaaattagcccagatggctcttatcgcttaccttacaaatttgaagtacagcagatgttagaagaacctcagtggggattagtatttgaaaagacaagatggataatagaaaaatacaggctctcccataggagtggggttgaggtctgtgacatgcagactgtaagcacagtcagaacctctgcagctctcaacccaacagaggagactgtggcttcaacatgccaacctgagcaggtctcctctgcattaccttcctcccatttctcttcctgggtcctgatgaggctgctacaggtaatagctacatgccctaaagccccagttgctcagatggaaggctccatgcccagtgagtacaggagggccggtaaaggcacccaggcacccagattggctgaaaacttctgtgtctgccatttagctactggggacatgctgagggccatggtggcttctggctcagagctaggaaaaaagctgaaggcaactatggatgctgggaaactggtgagtgatgaaatggtagtggagctcattgagaagaatttggagacccccttgtgcaaaaatggttttcttctggatggcttccctcggactgtgaggcaggcagaaatgctcgatgacctcatggagaagaggaaagagaagcttgattctgtgattgaattcagcatcccagactctctgctgatccgaagaatcacaggaaggctgattcaccccaagagtggccgttcctaccacgaggagttcaaccctccaaaagagcccatgaaagatgacatcaccggggaacccttgatccgtcgatcagatgataatgaaaaggccttgaaaatccgcctgcaagcctaccacactcaaaccaccccactcatagagtactacaggaaacgggggatccactccgccatcgatgcatcccagacccccgatgtcgtgttcgcaagcatcctagcagccttctccaaagccacatgtaaagacttggttatgtttatctaatgttgggtccaagaaggaatttctttccatccctgtgaggcaatgggtgggaatgataggacaggcaaagagaagcttcctcaggctagcaaaaatatcatttgatgtattgattaaaaaagcacttgcttgatgtaaaaaaaaaaaaa

SEQ ID NO: 170 - DNA, 13375 bp, Homo sapiens
  CDS (1)..(12294)
atggcgggctccggagccggtgtgcgttgctccctgctgcggctgcaggagaccttgtccgctgcggaccgctgcggtgctgccctggccggtcatcaactgatccgcggcctggggcaggaatgcgtcctgagcagcagccccgcggtgctggcattacagacatctttagttttttccagagatttcggtttgcttgtatttgtccggaagtcactcaacagtattgaatttcgtgaatgtagagaagaaatcctaaagtttttatgtattttcttagaaaaaatgggccagaagatcgcaccttactctgttgaaattaagaacacttgtaccagtgtttatacaaaagatagagctgctaaatgtaaaattccagccctggaccttcttattaagttacttcagacttttagaagttctagactcatggatgaatttaaaattggagaattatttagtaaattctatggagaacttgcattgaaaaaaaaaataccagatacagttttagaaaaagtatatgagctcctaggattattgggtgaagttcatcctagtgagatgataaataatgcagaaaacctgttccgcgcttttctgggtgaacttaagacccagatgacatcagcagtaagagagcccaaactacctgttctggcaggatgtctgaaggggttgtcctcacttctgtgcaacttcactaagtccatggaagaagatccccagacttcaagggagatttttaattttgtactaaaggcaattcgtcctcagattgatctgaagagatatgctgtgccctcagctggcttgcgcctatttgccctgcatgcatctcagtttagcacctgccttctggacaactacgtgtctctatttgaagtcttgttaaagtggtgtgcccacacaaatgtagaattgaaaaaagctgcactttcagccctggaatcctttctgaaacaggtttctaatatggtggcgaaaaatgcagaaatgcataaaaataaactgcagtactttatggagcagttttatggaatcatcagaaatgtggattcgaacaacaaggagttatctattgctatccgtggatatggactttttgcaggaccgtgcaaggttataaacgcaaaagatgttgacttcatgtacgttgagctcattcagcgctgcaagcagatgttcctcacccagacagacactggtgactaccgtgtttatcagatgccaagcttcctccagtctgttgcaagcgtcttgctgtaccttgacacagttcctgaggtgtatactccagttctggagcacctcgtggtgatgcagatagacagtttcccacagtacagtccaaaaatgcagctggtgtgttgcagagccatagtgaaggtgttcctagctttggcagcaaaagggccagttctcaggaattgcattagtactgtggtgcatcagggtttaatcagaatatgttctaaaccagtggtccttccaaagggccctgagtctgaatctgaagaccaccgtgcttcaggggaagtcagaactggcaaatggaaggtgcccacatacaaagactacgtggatctcttcagacatctcctgagctctgaccagatgatggattctattttagcagatgaagcatttttctctgtgaattcctccagtgaaagtctgaatcatttactttatgatgaatttgtaaaatccgttttgaagattgttgagaaattggatcttacacttgaaatacagactgttggggaacaagagaatggagatgaggcgcctggtgtttggatgatcccaacttcagatccagcggctaacttgcatccagctaaacctaaagatttttcggctttcattaacctggtggaattttgcagagagattctccctgagaaacaagcagaattttttgaaccatgggtgtactcattttcatatgaattaattttgcaatctacaaggttgcccctcatcagtggtttctacaaattgctttctattacagtaagaaatgccaagaaaataaaatatttcgagggagttagtccaaagagtctgaaacactctcctgaagacccagaaaagtattcttgctttgctttatttgtgaaatttggcaaagaggtggcagttaaaatgaagcagtacaaagatgaacttttggcctcttgtttgacctttcttctgtccttgccacacaacatcattgaactcgatgttagagcctacgttcctgcactgcagatggctttcaaactgggcctgagctatacccccttggcagaagtaggcctgaatgctctagaagaatggtcaatttatattgacagacatgtaatgcagccttattacaaagacattctcccctgcctggatggatacctgaagacttcagccttgtcagatgagaccaagaataactgggaagtgtcagctctttctcgggctgcccagaaaggatttaataaagtggtgttaaagcatctgaagaagacaaagaacctttcatcaaacgaagcaatatccttagaagaaataagaattagagtagtacaaatgcttggatctctaggaggacaaataaacaaaaatcttctgacagtcacgtcctcagatgagatgatgaagagctatgtggcctgggacagagagaagcggctgagctttgcagtgccctttagagagatgaaacctgtcattttcctggatgtgttcctgcctcgagtcacagaattagcgctcacagccagtgacagacaaactaaagttgcagcctgtgaacttttacatagcatggttatgtttatgttgggcaaagccacgcagatgccagaagggggacagggagccccacccatgtaccagctctataagcggacgtttcctgtgctgcttcgacttgcgtgtgatgttgatcaggtgacaaggcaactgtatgagccactagttatgcagctgattcactggttcactaacaacaagaaatttgaaagtcaggatactgtttccttactagaagctatattggatggaattgtggaccctgttgacagtactttaagagatttttgtggtcggtgtattcgagaattccttaaatggtccattaagcaaataacaccacagcagcaggagaagagtccagtaaacaccaaatcgcttttcaagcgactttatagccttgcgcttcaccccaatgctttcaagaggctgggagcatcacttgcctttaataatatctacagggaattcagggaagaagagtctctggtggaacagtttgtgtttgaagccttggtgatatacatggagagtctggccttagcacatgcagatgagaagtccttaggtacaattcaacagtgttgtgatgccattgatcacctatgccgcatcattgaaaagaagcatgtttctttaaataaagcaaagaaacgacgtttgccgcgaggatttccaccttccgcatcattgtgtttattggatctggtcaagtggcttttagctcattgtgggaggccccagacagaatgtcgacacaaatccattgaactcttttataaattcgttcctttattgccaggcaacagatcccctaatttgtggctgaaagatgttctcaaggaagaaggtgtctcttttctcatcaacacctttgaggggggtggctgtggccagccctcgggcatcctggcccagcccaccctcttgtaccttcgggggccattcagcctgcaggccacgctatgctggctggacctgctcctggccgcgttggagtgctacaacacgttcattggcgagagaactgtaggagcgctccaggtcctaggtactgaagcccagtcttcacttttgaaagcagtggctttcttcttagaaagcattgccatgcatgacattatagcagcagaaaagtgctttggcactggggcagcaggtaacagaacaagcccacaagagggagaaaggtacaactacagcaaatgcaccgttgtggtccggattatggagtttaccacgactctgctaaacacctccccggaaggatggaagctcctgaagaaggacttgtgtaatacacacctgatgagagtcctggtgcagacgctgtgtgagcccgcaagcataggtttcaacatcggagacgtccaggttatggctcatcttcctgatgtttgtgtgaatctgatgaaagctctaaagatgtccccatacaaagatatcctagagacccatctgagagagaaaataacagcacagagcattgaggagctttgtgccgtcaacttgtatggccctgacgcgcaagtggacaggagcaggctggctgctgttgtgtctgcctgtaaacagcttcacagagctgggcttctgcataatatattaccgtctcagtccacagatttgcatcattctgttggcacagaacttctttccctggtttataaaggcattgcccctggagatgagagacagtgtctgccttctctagacctcagttgtaagcagctggccagcggacttctggagttagcctttgcttttggaggactgtgtgagcgccttgtgagtcttctcctgaacccagcggtgctgtccacggcgtccttgggcagctcacagggcagcgtcatccacttctcccatggggagtatttctatagcttgttctcagaaacgatcaacacggaattattgaaaaatctggatcttgctgtattggagctcatgcagtcttcagtggataataccaaaatggtgagtgccgttttgaacggcatgttagaccagagcttcagggagcgagcaaaccagaaacaccaaggactgaaacttgcgactacaattctgcaacactggaagaagtgtgattcatggtgggccaaagattcccctctcgaaactaaaatggcagtgctggccttactggcaaaaattttacagattgattcatctgtatcttttaatacaagtcatggttcattccctgaagtctttacaacatatattagtctacttgctgacacaaagctggatctacatttaaagggccaagctgtcactcttcttccattcttcaccagcctcactggaggcagtctggaggaacttagacgtgttctggagcagctcatcgttgctcacttccccatgcagtccagggaatttcctccaggaactccgcggttcaataattatgtggactgcatgaaaaagtttctagatgcattggaattatctcaaagccctatgttgttggaattgatgacagaagttctttgtcgggaacagcagcatgtcatggaagaattatttcaatccagtttcaggaggattgccagaaggggttcatgtgtcacacaagtaggccttctggaaagcgtgtatgaaatgttcaggaaggatgacccccgcctaagtttcacacgccagtcctttgtggaccgctccctcctcactctgctgtggcactgtagcctggatgctttgagagaattcttcagcacaattgtggtggatgccattgatgtgttgaagtccaggtttacaaagctaaatgaatctacctttgatactcaaatcaccaagaagatgggctactataagattctagacgtgatgtattctcgccttcccaaagatgatgttcatgctaaggaatcaaaaattaatcaagttttccatggctcgtgtattacagaaggaaatgaacttacaaagacattgattaaattgtgctacgatgcatttacagagaacatggcaggagagaatcagctgctggagaggagaagactttaccattgtgcagcatacaactgcgccatatctgtcatctgctgtgtcttcaatgagttaaaattttaccaaggttttctgtttagtgaaaaaccagaaaagaacttgcttatttttgaaaatctgatcgacctgaagcgccgctataattttcctgtagaagttgaggttcctatggaaagaaagaaaaagtacattgaaattaggaaagaagccagagaagcagcaaatggggattcagatggtccttcctatatgtcttccctgtcatatttggcagacagtaccctgagtgaggaaatgagtcaatttgatttctcaaccggagttcagagctattcatacagctcccaagaccctagacctgccactggtcgttttcggagacgggagcagcgggaccccacggtgcatgatgatgtgctggagctggagatggacgagctcaatcggcatgagtgcatggcgcccctgacggccctggtcaagcacatgcacagaagcctgggcccgcctcaaggagaagaggattcagtgccaagagatcttccttcttggatgaaattcctccatggcaaactgggaaatccaatagtaccattaaatatccgtctcttcttagccaagcttgttattaatacagaagaggtctttcgcccttacgcgaagcactggcttagccccttgctgcagctggctgcttctgaaaacaatggaggagaaggaattcactacatggtggttgagatagtggccactattctttcatggacaggcttggccactccaacaggggtccctaaagatgaagtgttagcaaatcgattgcttaatttcctaatgaaacatgtctttcatccaaaaagagctgtgtttagacacaaccttgaaattataaagacccttgtcgagtgctggaaggattgtttatccatcccttataggttaatatttgaaaagttttccggtaaagatcctaattctaaagacaactcagtagggattcaattgctaggcatcgtgatggccaatgacctgcctccctatgacccacagtgtggcatccagagtagcgaatacttccaggctttggtgaataatatgtcctttgtaagatataaagaagtgtatgccgctgcagcagaagttctaggacttatacttcgatatgttatggagagaaaaaacatactggaggagtctctgtgtgaactggttgcgaaacaattgaagcaacatcagaatactatggaggacaagtttattgtgtgcttgaacaaagtgaccaagagcttccctcctcttgcagacaggttcatgaatgctgtgttctttctgctgccaaaatttcatggagtgttgaaaacactctgtctggaggtggtactttgtcgtgtggagggaatgacagagctgtacttccagttaaagagcaaggacttcgttcaagtcatgagacatagagatgatgaaagacaaaaagtatgtttggacataatttataagatgatgccaaagttaaaaccagtagaactccgagaacttctgaaccccgttgtggaattcgtttcccatccttctacaacatgtagggaacaaatgtataatattctcatgtggattcatgataattacagagatccagaaagtgagacagataatgactcccaggaaatatttaagttggcaaaagatgtgctgattcaaggattgatcgatgagaaccctggacttcaattaattattcgaaatttctggagccatgaaactaggttaccttcaaataccttggaccggttgctggcactaaattccttatattctcctaagatagaagtgcactttttaagtttagcaacaaattttctgctcgaaatgaccagcatgagcccagattatccaaaccccatgttcgagcatcctctgtcagaatgcgaatttcaggaatataccattgattctgattggcgtttccgaagtactgttctcactccgatgtttgtggagacccaggcctcccagggcactctccagacccgtacccaggaagggtccctctcagctcgctggccagtggcagggcagataagggccacccagcagcagcatgacttcacactgacacagactgcagatggaagaagctcatttgattggctgaccgggagcagcactgacccgctggtcgaccacaccagtccctcatctgactccttgctgtttgcccacaagaggagtgaaaggttacagagagcacccttgaagtcagtggggcctgattttgggaaaaaaaggctgggccttccaggggacgaggtggataacaaagtgaaaggtgcggccggccggacggacctactacgactgcgcagacggtttatgagggaccaggagaagctcagtttgatgtatgccagaaaaggcgttgctgagcaaaaacgagagaaggaaatcaagagtgagttaaaaatgaagcaggatgcccaggtcgttctgtacagaagctaccggcacggagaccttcctgacattcagatcaagcacagcagcctcatcaccccgttacaggccgtggcccagagggacccaataattgcaaaacagctctttagcagcttgttttctggaattttgaaagagatggataaatttaagacactgtctgaaaaaaacaacatcactcaaaagttgcttcaagacttcaatcgttttcttaataccaccttctctttctttccaccctttgtctcttgtattcaggacattagctgtcagcacgcagccctgctgagcctcgacccagcggctgttagcgctggttgcctggccagcctacagcagcccgtgggcatccgcctgctagaggaggctctgctccgcctgctgcctgctgagctgcctgccaagcgagtccgtgggaaggcccgcctccctcctgatgtcctcagatgggtggagcttgctaagctgtatagatcaattggagaatacgacgtcctccgtgggatttttaccagtgagataggaacaaagcaaatcactcagagtgcattattagcagaagccagaagtgattattctgaagctgctaagcagtatgatgaggctctcaataaacaagactgggtagatggtgagcccacagaagccgagaaggatttttgggaacttgcatcccttgactgttacaaccaccttgctgagtggaaatcacttgaatactgttctacagccagtatagacagtgagaaccccccagacctaaataaaatctggagtgaaccattttatcaggaaacatatctaccttacatgatccgcagcaagctgaagctgctgctccagggagaggctgaccagtccctgctgacatttattgacaaagctatgcacggggagctccagaaggcgattctagagcttcattacagtcaagagctgagtctgctttacctcctgcaagatgatgttgacagagccaaatattacattcaaaatggcattcagagttttatgcagaattattctagtattgatgtcctcttacaccaaagtagactcaccaaattgcagtctgtacaggctttaacagaaattcaggagttcatcagctttataagcaaacaaggcaatttatcatctcaagttccccttaagagacttctgaacacctggacaaacagatatccagatgctaaaatggacccaatgaacatctgggatgacatcatcacaaatcgatgtttctttctcagcaaaatagaggagaagcttacccctcttccagaagataatagtatgaatgtggatcaagatggagaccccagtgacaggatggaagtgcaagagcaggaagaagatatcagctccctgatcaggagttgcaagttttccatgaaaatgaagatgatagacagtgcccggaagcagaacaatttctcacttgctatgaaactactgaaggagctgcataaagagtcaaaaaccagagacgattggctggtgagctgggtgcagagctactgccgcctgagccactgccggagccggtcccagggctgctctgagcaggtgctcactgtgctgaaaacagtctctttgttggatgagaacaacgtgtcaagctacttaagcaaaaatattctggctttccgtgaccagaacattctcttgggtacaacttacaggatcatagcgaatgctctcagcagtgagccagcctgccttgctgaaatcgaggaggacaaggctagaagaatcttagagctttctggatccagttcagaggattcagagaaggtgatcgcgggtctgtaccagagagcattccagcacctctctgaggctgtgcaggcggctgaggaggaggcccagcctccctcctggagctgtgggcctgcagctggggtgattgatgcttacatgacgctggcagatttctgtgaccaacagctgcgcaaggaggaagagaatgcatcagttattgattctgcagaactgcaggcgtatccagcacttgtggtggagaaaatgttgaaagctttaaaattaaattccaatgaagccagattgaagtttcctagattacttcagattatagaacggtatccagaggagactttgagcctcatgacaaaagagatctcttccgttccctgctggcagttcatcagctggatcagccacatggtggccttactggacaaagaccaagccgttgctgttcagcactctgtggaagaaatcactgataactacccgcaggctattgtttatcccttcatcataagcagcgaaagctattccttcaaggatacttctactggtcataagaataaggagtttgtggcaaggattaaaagtaagttggatcaaggaggagtgattcaagattttattaatgccttagatcagctctctaatcctgaactgctctttaaggattggagcaatgatgtaagagctgaactagcaaaaacccctgtaaataaaaaaaacattgaaaaaatgtatgaaagaatgtatgcagccttgggtgacccaaaggctccaggcctgggggcctttagaaggaagtttattcagacttttggaaaagaatttgataaacattttgggaaaggaggttctaaactactgagaatgaagctcagtgacttcaacgacattaccaacatgctacttttaaaaatgaacaaagactcaaagccccctgggaatctgaaagaatgttcaccctggatgagcgacttcaaagtggagttcctgagaaatgagctggagattcccggtcagtatgacggtaggggaaagccattgccagagtaccacgtgcgaatcgccgggtttgatgagcgggtgacagtcatggcgtctctgcgaaggcccaagcgcatcatcatccgtggccatgacgagagggaacaccctttcctggtgaagggtggcgaggacctgcggcaggaccagcgcgtggagcagctcttccaggtcatgaatgggatcctggcccaagactccgcctgcagccagagggccctgcagctgaggacctatagcgttgtgcccatgacctccagtgatcccagggcaccgccgtgtgaatataaagattggctgacaaaaatgtcaggaaaacatgatgttggagcttacatgctaatgtataagggcgctaatcgtactgaaacagtcacgtcttttagaaaacgagaaagtaaagtgcctgctgatctcttaaagcgggccttcgtgaggatgagtacaagccctgaggctttcctggcgctccgctcccacttcgccagctctcacgctctgatatgcatcagccactggatcctcgggattggagacagacatctgaacaactttatggtggccatggagactggcggcgtgatcgggatcgactttgggcatgcgtttggatccgctacacagtttctgccagtccctgagttgatgccttttcggctaactcgccagtttatcaatctgatgttaccaatgaaagaaacgggccttatgtacagcatcatggtacacgcactccgggccttccgctcagaccctggcctgctcaccaacaccatggatgtgtttgtcaaggagccctcctttgattggaaaaattttgaacagaaaatgctgaaaaaaggagggtcatggattcaagaaataaatgttgctgaaaaaaattggtacccccgacagaaaatatgttacgctaagagaaagttagcaggtgccaatccagcagtcattacttgtgatgagctactcctgggtcatgagaaggcccctgccttcagagactatgtggctgtggcacgaggaagcaaagatcacaacattcgtgcccaagaaccagagagtgggctttcagaagagactcaagtgaagtgcctgatggaccaggcaacagaccccaacatccttggcagaacctgggaaggatgggagccctggatgtgaggtctgtgggagtctgcagatagaaagcattacattgtttaaagaatctactatactttggttggcagcattccatgagctgattttcctgaaacactaaagagaaatgtcttttgtgctacagtttcgtagcatgagtttaaatcaagattatgatgagtaaatgtgtatgggttaaatcaaagataaggttatagtaacatcaaagattaggtgaggtttatagaaagatagatatccaggcttaccaaagtattaagtcaagaatataatatgtgatcagctttcaaagcatttacaagtgctgcaagttagtgaaacagctgtctccgtaaatggaggaaatgtggggaagccttggaatgcccttctggttctggcacattggaaagcacactcagaaggcttcatcaccaagattttgggagagtaaagctaagtatagttgatgtaacattgtagaagcagcataggaacaataagaacaataggtaaagctataattatggcttatatttagaaatgactgcatttgatattttaggatatttttctaggttttttcctttcattttattctcttctagttttgacattttatgatagatttgctctctagaaggaaacgtctttatttaggagggcaaaaattttggtcatagcattcacttttgctattccaatctacaactggaagatacataaaagtgctttgcattgaatttgggataacttcaaaaatcccatggttgttgttagggatagtactaagcatttcagttccaggagaataaaagaaattcctatttgaaatgaattcctcatttggaggaaaaaaagcatgcattctagcacaacaagatgaaattatggaatacaaaagtggctccttcccatgtgcagtccctgtccccccccgccagtcctccacacccaaactgtttctgattggcttttagctttttgttgtttttttttttccttctaacacttgtatttggaggctcttctgtgattttgagaagtatactcttgagtgtttaataaagtttttttccaaaagtaaaaaaaaaaaaaaaaa

SEQ ID NO: 171 - DNA, 13468 bp, Homo sapiens
  CDS (1)..(12387)
atggcgggctccggagccggtgtgcgttgctccctgctgcggctgcaggagaccttgtccgctgcggaccgctgcggtgctgccctggccggtcatcaactgatccgcggcctggggcaggaatgcgtcctgagcagcagccccgcggtgctggcattacagacatctttagttttttccagagatttcggtttgcttgtatttgtccggaagtcactcaacagtattgaatttcgtgaatgtagagaagaaatcctaaagtttttatgtattttcttagaaaaaatgggccagaagatcgcaccttactctgttgaaattaagaacacttgtaccagtgtttatacaaaagatagagctgctaaatgtaaaattccagccctggaccttcttattaagttacttcagacttttagaagttctagactcatggatgaatttaaaattggagaattatttagtaaattctatggagaacttgcattgaaaaaaaaaataccagatacagttttagaaaaagtatatgagctcctaggattattgggtgaagttcatcctagtgagatgataaataatgcagaaaacctgttccgcgcttttctgggtgaacttaagacccagatgacatcagcagtaagagagcccaaactacctgttctggcaggatgtctgaaggggttgtcctcacttctgtgcaacttcactaagtccatggaagaagatccccagacttcaagggagatttttaattttgtactaaaggcaattcgtcctcagattgatctgaagagatatgctgtgccctcagctggcttgcgcctatttgccctgcatgcatctcagtttagcacctgccttctggacaactacgtgtctctatttgaagtcttgttaaagtggtgtgcccacacaaatgtagaattgaaaaaagctgcactttcagccctggaatcctttctgaaacaggtttctaatatggtggcgaaaaatgcagaaatgcataaaaataaactgcagtactttatggagcagttttatggaatcatcagaaatgtggattcgaacaacaaggagttatctattgctatccgtggatatggactttttgcaggaccgtgcaaggttataaacgcaaaagatgttgacttcatgtacgttgagctcattcagcgctgcaagcagatgttcctcacccagacagacactggtgactaccgtgtttatcagatgccaagcttcctccagtctgttgcaagcgtcttgctgtaccttgacacagttcctgaggtgtatactccagttctggagcacctcgtggtgatgcagatagacagtttcccacagtacagtccaaaaatgcagctggtgtgttgcagagccatagtgaaggtgttcctagctttggcagcaaaagggccagttctcaggaattgcattagtactgtggtgcatcagggtttaatcagaatatgttctaaaccagtggtccttccaaagggccctgagtctgaatctgaagaccaccgtgcttcaggggaagtcagaactggcaaatggaaggtgcccacatacaaagactacgtggatctcttcagacatctcctgagctctgaccagatgatggattctattttagcagatgaagcatttttctctgtgaattcctccagtgaaagtctgaatcatttactttatgatgaatttgtaaaatccgttttgaagattgttgagaaattggatcttacacttgaaatacagactgttggggaacaagagaatggagatgaggcgcctggtgtttggatgatcccaacttcagatccagcggctaacttgcatccagctaaacctaaagatttttcggctttcattaacctggtggaattttgcagagagattctccctgagaaacaagcagaattttttgaaccatgggtgtactcattttcatatgaattaattttgcaatctacaaggttgcccctcatcagtggtttctacaaattgctttctattacagtaagaaatgccaagaaaataaaatatttcgagggagttagtccaaagagtctgaaacactctcctgaagacccagaaaagtattcttgctttgctttatttgtgaaatttggcaaagaggtggcagttaaaatgaagcagtacaaagatgaacttttggcctcttgtttgacctttcttctgtccttgccacacaacatcattgaactcgatgttagagcctacgttcctgcactgcagatggctttcaaactgggcctgagctatacccccttggcagaagtaggcctgaatgctctagaagaatggtcaatttatattgacagacatgtaatgcagccttattacaaagacattctcccctgcctggatggatacctgaagacttcagccttgtcagatgagaccaagaataactgggaagtgtcagctctttctcgggctgcccagaaaggatttaataaagtggtgttaaagcatctgaagaagacaaagaacctttcatcaaacgaagcaatatccttagaagaaataagaattagagtagtacaaatgcttggatctctaggaggacaaataaacaaaaatcttctgacagtcacgtcctcagatgagatgatgaagagctatgtggcctgggacagagagaagcggctgagctttgcagtgccctttagagagatgaaacctgtcattttcctggatgtgttcctgcctcgagtcacagaattagcgctcacagccagtgacagacaaactaaagttgcagcctgtgaacttttacatagcatggttatgtttatgttgggcaaagccacgcagatgccagaagggggacagggagccccacccatgtaccagctctataagcggacgtttcctgtgctgcttcgacttgcgtgtgatgttgatcaggtgacaaggcaactgtatgagccactagttatgcagctgattcactggttcactaacaacaagaaatttgaaagtcaggatactgtttccttactagaagctatattggatggaattgtggaccctgttgacagtactttaagagatttttgtggtcggtgtattcgagaattccttaaatggtccattaagcaaataacaccacagcagcaggagaagagtccagtaaacaccaaatcgcttttcaagcgactttatagccttgcgcttcaccccaatgctttcaagaggctgggagcatcacttgcctttaataatatctacagggaattcagggaagaagagtctctggtggaacagtttgtgtttgaagccttggtgatatacatggagagtctggccttagcacatgcagatgagaagtccttaggtacaattcaacagtgttgtgatgccattgatcacctatgccgcatcattgaaaagaagcatgtttctttaaataaagcaaagaaacgacgtttgccgcgaggatttccaccttccgcatcattgtgtttattggatctggtcaagtggcttttagctcattgtgggaggccccagacagaatgtcgacacaaatccattgaactcttttataaattcgttcctttattgccaggcaacagatcccctaatttgtggctgaaagatgttctcaaggaagaaggtgtctcttttctcatcaacacctttgaggggggtggctgtggccagccctcgggcatcctggcccagcccaccctcttgtaccttcgggggccattcagcctgcaggccacgctatgctggctggacctgctcctggccgcgttggagtgctacaacacgttcattggcgagagaactgtaggagcgctccaggtcctaggtactgaagcccagtcttcacttttgaaagcagtggctttcttcttagaaagcattgccatgcatgacattatagcagcagaaaagtgctttggcactggggcagcaggtaacagaacaagcccacaagagggagaaaggtacaactacagcaaatgcaccgttgtggtccggattatggagtttaccacgactctgctaaacacctccccggaaggatggaagctcctgaagaaggacttgtgtaatacacacctgatgagagtcctggtgcagacgctgtgtgagcccgcaagcataggtttcaacatcggagacgtccaggttatggctcatcttcctgatgtttgtgtgaatctgatgaaagctctaaagatgtccccatacaaagatatcctagagacccatctgagagagaaaataacagcacagagcattgaggagctttgtgccgtcaacttgtatggccctgacgcgcaagtggacaggagcaggctggctgctgttgtgtctgcctgtaaacagcttcacagagctgggcttctgcataatatattaccgtctcagtccacagatttgcatcattctgttggcacagaacttctttccctggtttataaaggcattgcccctggagatgagagacagtgtctgccttctctagacctcagttgtaagcagctggccagcggacttctggagttagcctttgcttttggaggactgtgtgagcgccttgtgagtcttctcctgaacccagcggtgctgtccacggcgtccttgggcagctcacagggcagcgtcatccacttctcccatggggagtatttctatagcttgttctcagaaacgatcaacacggaattattgaaaaatctggatcttgctgtattggagctcatgcagtcttcagtggataataccaaaatggtgagtgccgttttgaacggcatgttagaccagagcttcagggagcgagcaaaccagaaacaccaaggactgaaacttgcgactacaattctgcaacactggaagaagtgtgattcatggtgggccaaagattcccctctcgaaactaaaatggcagtgctggccttactggcaaaaattttacagattgattcatctgtatcttttaatacaagtcatggttcattccctgaagtctttacaacatatattagtctacttgctgacacaaagctggatctacatttaaagggccaagctgtcactcttcttccattcttcaccagcctcactggaggcagtctggaggaacttagacgtgttctggagcagctcatcgttgctcacttccccatgcagtccagggaatttcctccaggaactccgcggttcaataattatgtggactgcatgaaaaagtttctagatgcattggaattatctcaaagccctatgttgttggaattgatgacagaagttctttgtcgggaacagcagcatgtcatggaagaattatttcaatccagtttcaggaggattgccagaaggggttcatgtgtcacacaagtaggccttctggaaagcgtgtatgaaatgttcaggaaggatgacccccgcctaagtttcacacgccagtcctttgtggaccgctccctcctcactctgctgtggcactgtagcctggatgctttgagagaattcttcagcacaattgtggtggatgccattgatgtgttgaagtccaggtttacaaagctaaatgaatctacctttgatactcaaatcaccaagaagatgggctactataagattctagacgtgatgtattctcgccttcccaaagatgatgttcatgctaaggaatcaaaaattaatcaagttttccatggctcgtgtattacagaaggaaatgaacttacaaagacattgattaaattgtgctacgatgcatttacagagaacatggcaggagagaatcagctgctggagaggagaagactttaccattgtgcagcatacaactgcgccatatctgtcatctgctgtgtcttcaatgagttaaaattttaccaaggttttctgtttagtgaaaaaccagaaaagaacttgcttatttttgaaaatctgatcgacctgaagcgccgctataattttcctgtagaagttgaggttcctatggaaagaaagaaaaagtacattgaaattaggaaagaagccagagaagcagcaaatggggattcagatggtccttcctatatgtcttccctgtcatatttggcagacagtaccctgagtgaggaaatgagtcaatttgatttctcaaccggagttcagagctattcatacagctcccaagaccctagacctgccactggtcgttttcggagacgggagcagcgggaccccacggtgcatgatgatgtgctggagctggagatggacgagctcaatcggcatgagtgcatggcgcccctgacggccctggtcaagcacatgcacagaagcctgggcccgcctcaaggagaagaggattcagtgccaagagatcttccttcttggatgaaattcctccatggcaaactgggaaatccaatagtaccattaaatatccgtctcttcttagccaagcttgttattaatacagaagaggtctttcgcccttacgcgaagcactggcttagccccttgctgcagctggctgcttctgaaaacaatggaggagaaggaattcactacatggtggttgagatagtggccactattctttcatggacaggcttggccactccaacaggggtccctaaagatgaagtgttagcaaatcgattgcttaatttcctaatgaaacatgtctttcatccaaaaagagctgtgtttagacacaaccttgaaattataaagacccttgtcgagtgctggaaggattgtttatccatcccttataggttaatatttgaaaagttttccggtaaagatcctaattctaaagacaactcagtagggattcaattgctaggcatcgtgatggccaatgacctgcctccctatgacccacagtgtggcatccagagtagcgaatacttccaggctttggtgaataatatgtcctttgtaagatataaagaagtgtatgccgctgcagcagaagttctaggacttatacttcgatatgttatggagagaaaaaacatactggaggagtctctgtgtgaactggttgcgaaacaattgaagcaacatcagaatactatggaggacaagtttattgtgtgcttgaacaaagtgaccaagagcttccctcctcttgcagacaggttcatgaatgctgtgttctttctgctgccaaaatttcatggagtgttgaaaacactctgtctggaggtggtactttgtcgtgtggagggaatgacagagctgtacttccagttaaagagcaaggacttcgttcaagtcatgagacatagagatgatgaaagacaaaaagtatgtttggacataatttataagatgatgccaaagttaaaaccagtagaactccgagaacttctgaaccccgttgtggaattcgtttcccatccttctacaacatgtagggaacaaatgtataatattctcatgtggattcatgataattacagagatccagaaagtgagacagataatgactcccaggaaatatttaagttggcaaaagatgtgctgattcaaggattgatcgatgagaaccctggacttcaattaattattcgaaatttctggagccatgaaactaggttaccttcaaataccttggaccggttgctggcactaaattccttatattctcctaagatagaagtgcactttttaagtttagcaacaaattttctgctcgaaatgaccagcatgagcccagattatccaaaccccatgttcgagcatcctctgtcagaatgcgaatttcaggaatataccattgattctgattggcgtttccgaagtactgttctcactccgatgtttgtggagacccaggcctcccagggcactctccagacccgtacccaggaagggtccctctcagctcgctggccagtggcagggcagataagggccacccagcagcagcatgacttcacactgacacagactgcagatggaagaagctcatttgattggctgaccgggagcagcactgacccgctggtcgaccacaccagtccctcatctgactccttgctgtttgcccacaagaggagtgaaaggttacagagagcacccttgaagtcagtggggcctgattttgggaaaaaaaggctgggccttccaggggacgaggtggataacaaagtgaaaggtgcggccggccggacggacctactacgactgcgcagacggtttatgagggaccaggagaagctcagtttgatgtatgccagaaaaggcgttgctgagcaaaaacgagagaaggaaatcaagagtgagttaaaaatgaagcaggatgcccaggtcgttctgtacagaagctaccggcacggagaccttcctgacattcagatcaagcacagcagcctcatcaccccgttacaggccgtggcccagagggacccaataattgcaaaacagctctttagcagcttgttttctggaattttgaaagagatggataaatttaagacactgtctgaaaaaaacaacatcactcaaaagttgcttcaagacttcaatcgttttcttaataccaccttctctttctttccaccctttgtctcttgtattcaggacattagctgtcagcacgcagccctgctgagcctcgacccagcggctgttagcgctggttgcctggccagcctacagcagcccgtgggcatccgcctgctagaggaggctctgctccgcctgctgcctgctgagctgcctgccaagcgagtccgtgggaaggcccgcctccctcctgatgtcctcagatgggtggagcttgctaagctgtatagatcaattggagaatacgacgtcctccgtgggatttttaccagtgagataggaacaaagcaaatcactcagagtgcattattagcagaagccagaagtgattattctgaagctgctaagcagtatgatgaggctctcaataaacaagactgggtagatggtgagcccacagaagccgagaaggatttttgggaacttgcatcccttgactgttacaaccaccttgctgagtggaaatcacttgaatactgttctacagccagtatagacagtgagaaccccccagacctaaataaaatctggagtgaaccattttatcaggaaacatatctaccttacatgatccgcagcaagctgaagctgctgctccagggagaggctgaccagtccctgctgacatttattgacaaagctatgcacggggagctccagaaggcgattctagagcttcattacagtcaagagctgagtctgctttacctcctgcaagatgatgttgacagagccaaatattacattcaaaatggcattcagagttttatgcagaattattctagtattgatgtcctcttacaccaaagtagactcaccaaattgcagtctgtacaggctttaacagaaattcaggagttcatcagctttataagcaaacaaggcaatttatcatctcaagttccccttaagagacttctgaacacctggacaaacagatatccagatgctaaaatggacccaatgaacatctgggatgacatcatcacaaatcgatgtttctttctcagcaaaatagaggagaagcttacccctcttccagaagataatagtatgaatgtggatcaagatggagaccccagtgacaggatggaagtgcaagagcaggaagaagatatcagctccctgatcaggagttgcaagttttccatgaaaatgaagatgatagacagtgcccggaagcagaacaatttctcacttgctatgaaactactgaaggagctgcataaagagtcaaaaaccagagacgattggctggtgagctgggtgcagagctactgccgcctgagccactgccggagccggtcccagggctgctctgagcaggtgctcactgtgctgaaaacagtctctttgttggatgagaacaacgtgtcaagctacttaagcaaaaatattctggctttccgtgaccagaacattctcttgggtacaacttacaggatcatagcgaatgctctcagcagtgagccagcctgccttgctgaaatcgaggaggacaaggctagaagaatcttagagctttctggatccagttcagaggattcagagaaggtgatcgcgggtctgtaccagagagcattccagcacctctctgaggctgtgcaggcggctgaggaggaggcccagcctccctcctggagctgtgggcctgcagctggggtgattgatgcttacatgacgctggcagatttctgtgaccaacagctgcgcaaggaggaagagaatgcatcagttattgattctgcagaactgcaggcgtatccagcacttgtggtggagaaaatgttgaaagctttaaaattaaattccaatgaagccagattgaagtttcctagattacttcagattatagaacggtatccagaggagactttgagcctcatgacaaaagagatctcttccgttccctgctggcagttcatcagctggatcagccacatggtggccttactggacaaagaccaagccgttgctgttcagcactctgtggaagaaatcactgataactacccgcaggctattgtttatcccttcatcataagcagcgaaagctattccttcaaggatacttctactggtcataagaataaggagtttgtggcaaggattaaaagtaagttggatcaaggaggagtgattcaagattttattaatgccttagatcagctctctaatcctgaactgctctttaaggattggagcaatgatgtaagagctgaactagcaaaaacccctgtaaataaaaaaaacattgaaaaaatgtatgaaagaatgtatgcagccttgggtgacccaaaggctccaggcctgggggcctttagaaggaagtttattcagacttttggaaaagaatttgataaacattttgggaaaggaggttctaaactactgagaatgaagctcagtgacttcaacgacattaccaacatgctacttttaaaaatgaacaaagactcaaagccccctgggaatctgaaagaatgttcaccctggatgagcgacttcaaagtggagttcctgagaaatgagctggagattcccggtcagtatgacggtaggggaaagccattgccagagtaccacgtgcgaatcgccgggtttgatgagcgggtgacagtcatggcgtctctgcgaaggcccaagcgcatcatcatccgtggccatgacgagagggaacaccctttcctggtgaagggtggcgaggacctgcggcaggaccagcgcgtggagcagctcttccaggtcatgaatgggatcctggcccaagactccgcctgcagccagagggccctgcagctgaggacctatagcgttgtgcccatgacctccaggttaggattaattgagtggcttgaaaatactgttaccttgaaggaccttcttttgaacaccatgtcccaagaggagaaggcggcttacctgagtgatcccagggcaccgccgtgtgaatataaagattggctgacaaaaatgtcaggaaaacatgatgttggagcttacatgctaatgtataagggcgctaatcgtactgaaacagtcacgtcttttagaaaacgagaaagtaaagtgcctgctgatctcttaaagcgggccttcgtgaggatgagtacaagccctgaggctttcctggcgctccgctcccacttcgccagctctcacgctctgatatgcatcagccactggatcctcgggattggagacagacatctgaacaactttatggtggccatggagactggcggcgtgatcgggatcgactttgggcatgcgtttggatccgctacacagtttctgccagtccctgagttgatgccttttcggctaactcgccagtttatcaatctgatgttaccaatgaaagaaacgggccttatgtacagcatcatggtacacgcactccgggccttccgctcagaccctggcctgctcaccaacaccatggatgtgtttgtcaaggagccctcctttgattggaaaaattttgaacagaaaatgctgaaaaaaggagggtcatggattcaagaaataaatgttgctgaaaaaaattggtacccccgacagaaaatatgttacgctaagagaaagttagcaggtgccaatccagcagtcattacttgtgatgagctactcctgggtcatgagaaggcccctgccttcagagactatgtggctgtggcacgaggaagcaaagatcacaacattcgtgcccaagaaccagagagtgggctttcagaagagactcaagtgaagtgcctgatggaccaggcaacagaccccaacatccttggcagaacctgggaaggatgggagccctggatgtgaggtctgtgggagtctgcagatagaaagcattacattgtttaaagaatctactatactttggttggcagcattccatgagctgattttcctgaaacactaaagagaaatgtcttttgtgctacagtttcgtagcatgagtttaaatcaagattatgatgagtaaatgtgtatgggttaaatcaaagataaggttatagtaacatcaaagattaggtgaggtttatagaaagatagatatccaggcttaccaaagtattaagtcaagaatataatatgtgatcagctttcaaagcatttacaagtgctgcaagttagtgaaacagctgtctccgtaaatggaggaaatgtggggaagccttggaatgcccttctggttctggcacattggaaagcacactcagaaggcttcatcaccaagattttgggagagtaaagctaagtatagttgatgtaacattgtagaagcagcataggaacaataagaacaataggtaaagctataattatggcttatatttagaaatgactgcatttgatattttaggatatttttctaggttttttcctttcattttattctcttctagttttgacattttatgatagatttgctctctagaaggaaacgtctttatttaggagggcaaaaattttggtcatagcattcacttttgctattccaatctacaactggaagatacataaaagtgctttgcattgaatttgggataacttcaaaaatcccatggttgttgttagggatagtactaagcatttcagttccaggagaataaaagaaattcctatttgaaatgaattcctcatttggaggaaaaaaagcatgcattctagcacaacaagatgaaattatggaatacaaaagtggctccttcccatgtgcagtccctgtccccccccgccagtcctccacacccaaactgtttctgattggcttttagctttttgttgtttttttttttccttctaacacttgtatttggaggctcttctgtgattttgagaagtatactcttgagtgtttaataaagtttttttccaaaagtaaaaaaaaaaaaaaaaa

SEQ ID NO: 172 - DNA, 412 bp, Homo sapiens
  CDS (45)..(122)
aggactttcgcacgaggcgccatcttccttgagactcctgcgccatgagagcgaagtggcggaagaagagaatgcgcaggctgaagcgcaagagaagaaagatgaggcagaggtccaagtaaaccatcttgtgcacccacgaagcctgcgggagcagaagtaagggatgctgaagcccggaacaagtggttggactgtatgctgctgtcggtaataagtctcagtagacccggaatgtcacctcgccgagatcagctgggaaaatgactaccttcctcacaaccaaaacagtcccgctggccctctgccctggacctttggcattctggactagttctgttctcttgtggccaagtgtaactcgtgtacaataaaccctcttgctgtcagctgaagaatcaaaaaaaaaaaa

SEQ ID NO: 173 - DNA, 1706 bp, Homo sapiens
  CDS (15)..(1295)
caggttgtaaatccatgtggcgggggctttggaccctggcggcccaagcggcacgtgggcctcgcagattgtgcacgcgccggagcagcggcgcaccagcccccggctccggcgccaccatcttcgcgctaagctctggccaaggccgctgcggcatcgcagtgatccggaccagcggccccgccagcggccacgccctccgaattctcacagcaccccgagacctgccccttgctcgccacgccagcctgcgcctgctcagcgatccccgctccggggagcctctggaccgcgcactggtgctctggttcccaggtccccagagtttcaccggtgaggactgcgtggagttccacgtgcatggaggcccggcagtggtgagcggcgtcctgcaggccttgggtgagttgcagcgttgggctctggcccacgtggaggcctatatcgatttcggcgaggatgacaacctggaggaggggccgacatcgaagtacgggcactgcaggtggcccctgggtgcacatctacgagatgccaggcgcgggcagaggctccgctcaggggtgcacgtagtggtcactggaccccccaatgcgggcaagagcagcctagtgaacctgctcagtcggaagcctgtgtccatcgtgtccccggagccagggaccacccgtgacgtgctggagaccccagtcgacctggccggatttcctgtgctgctgagcgacacggctgggttgcgggagggcgtggggcccgtggagcaggagggcgtgcggcgcgcccgggagaggctagagcaggctgacctcattctggccatgctggatgcttctgacctggcctctccctccagttgcaacttcctggccaccgtcgtagcctctgtgggagcccagagccccagtgacagcagccagcgcctcctcctggtgctgaacaagtcggacctgctgtccccggagggcccaggtcccggtcctgacctgcccccgcacctgctgctgtcctgtctgacgggagaggggctggacggcctcctggaggcgctgaggaaggagctagctgcagtgtgtggggacccgtccacagatcccccgctgctgacccgagcaaggcaccagcaccacctccagggttgcctggatgccctcggccactacaagcagtcaaaagacctggccctggcggcagaggcgctgcgggtggcccggggtcacctgacccggctcacaggtggagggggtaccgaggagatcctggacatcatcttccaggacttctgtgtgggcaagtgacgggatccagggaagtcgcacccaagctgcgtggagacccaggagcctcgggggatctggaaacagtttaggccaattgggattctcattcgcctgggaaagaacttgattctcaaatagtgaagcaacacagctgagaggtagtgagatccctgcagggactccctggagattcaggccctggaatggggctgaatggaggtcccgttcgacccttgatgctggggcatccgggttgggatggagataggaggatctcagtatatttgtttcgtagttttttatttattttgcaaataccaaaggaatgtaaaaaaaactcaggtgatctagaagtgtttattttcttcccttcccttcccttccctttccttttccctttccctttccccttccccttccccttcccca

SEQ ID NO: 174 - DNA, 918 bp, Homo sapiens
  CDS (116)..(766)
caacatggtgagtcttactgttgcgggctccggggccgtcgaccatgccgctcgacctccacctccgctgggaagctgaggcgccgaacggctcccagagggtcccgggaagcgcatggtgttcaggcgcttcgtggaggttggccgggtggcctatgtctcctttggacctcatgccggaaaattggtcgcgattgtagatgttattgatcagaacagggctttggtcgatggaccttgcactcaagtgaggagacaggccatgcctttcaagtgcatgcagctcactgatttcatcctcaagtttccgcacagtgcccaccagaagtatgtccgacaagcctggcagaaggcagacatcaatacaaaatgggcagccacacgatgggccaagaagattgaagccagagaaaggaaagccaagatgacagattttgatcgttttaaagttatgaaggcaaagaaaatgaggaacagaataatcaagaatgaagttaagaagcttcaaaaggcagctctcctgaaagcttctcccaaaaaagcacctggtactaagggtactgctgctgctgctgctgctgctgctgctgctgctaaagttccagcaaaaaagatcaccgccgcgagtaaaaaggctccagcccagaaggttcctgcccagaaagccacaggccagaaagcagcgcctgctccaaaagctcagaagggtcaaaaagctccagcccagaaagcacctgctccaaaggcatctggcaagaaagcataagtggcaatcataaaaagtaataaaggttctttttgacctgttgaaaaatgtatttaagcctttggatttaaagcctgttgaggctagagttaggaggcagattgatagtaggattataataaacattaaataatcagaaaaaaaaaaaaaaa

SEQ ID NO: 175 - DNA, 1503 bp, Homo sapiens
  CDS (1)..(1503)
atgatgtccatcgatggggaacagtggtcctttggaattctcctggctgtgcacatcgatgcactgctgtgccacaccgtgcccgagcccaggtcgccttttgctcttggtgccaacaaggactcactctcggccttcgagtacccggggcccaagcggaagctctacagtgccgtgcccgggaggctcttcgtcgctgtcaagccataccaaccccaagtggacggcgagatcccccttcaccgcggtgacagggtcaaaggtcagtgtctgctggttgtcctccgctcctggagtgagcacactggaacccagcagcacctcctcaaacatgaccagactggaacccgcccctcgcaggagcgtggggcgtgcggggagctgggcctgtctcccagggagaacagaaatgacagagctcggttccaaaactcacacttcaaaggatcgatggcaaaggactgctgttctgaaaagagattcgagtgggccgcgcaggccatttgcacacaattggcacggagccccttcctgctgccagtggcaccgctcttccttcctgccgagctgtcggtgcctcctccccatcgaccaagaagaggccctgccccatctaaaccagagaaaaacccagaacctctggacgggagccacgcagcagcactcacagctggcccagaaaggaccctcagcggccaccgtccgaaatccacacttggggttattgcaggagacgagctcacccctgagccccaggtagatggttcgcattctcctgccatctgcacacaggcccggcccttcaccctccaagccacggagacccagaaacctgccaccgaccaggggtcctgcgtggagggcctacaacgaccctggaggcttgtgccggccacattcctactgaatgcagatgaggttttatttcaaatggatttcattctggaagagggagagattggaggggaagaacttccagggtggagccacccgagctcgtgtttgaagcacaaaggagaggggcttggtgcacgcaacaccgtggggacacctttggggacaagtctcagctctgtgagcccggagaagtcccgtgagctctctgtgcctctgtttcctagtctgtttaatggggatattaatggtgccacttcacaggagagtcataaggataaagatcgagggaggcccgtggaaaatcggggtgagggcactgaggagcgggcgtcggaacctcccacagggtctctctccctggttggagagctgaaaggggctgggggtgtaactccaagagatactactcaccggttttctgaccctgaattgagctttagggccaagaacatggctattttggggggcagcggggaggagctctggagggtgaaggctcctcaccgcctgggcatttggtgccagactgcagatgccaggaccacacagaaagaaccactgcagctgcccaacgcctgggtgtctcaggacacattcaagcactag

SEQ ID NO: 176 - DNA, 2043 bp, Homo sapiens
  CDS (118)..(2043)
gtaccggtccggaattcccgggtcgacgatttcgtggggtccccacagacctgcaggttccggcccctcttttctcaacctagagcaaattgaaacgtccgggatttccaaagactcatgttacgtgaggaagccaccaagaagagcaaagaaaaggagccagggatggctcttcctcagggacgtttgactttcagggatgtggctatagagttctctttggaggagtggaaatgcctgaaccctgcacagagggctttatacagggctgtgatgttggagaactacaggaacctggagtttgtggatagctctttaaaatccatgacggagttctcatcaacagggcacggtaatacaggagaagtgatccacacagggacattgcaaagacataaaagtcatcacattggagatttttgcttcccagaaatcaagaaagatattcatgactttgagtttcagtggcaagaaattaaaagaaatggccatgaagcacccatgacaaaaatcaaaaagttgactggtagtacagaccgacgtgatcaaaggcatgctggaaacaagcctattaaagatcagcttggatcaagcttttattcacatctgcctgaactgcacgaatttcagactgaagggaaaattgataatcaagtggagaagtctatcaacaatgcttccttggtttcaacatcccaaagaatttcttgtaggctcaaaacccatatttctaataggtatgggaagaactttctccattcttcattattgacacaaatccaggaagaacacgtgagagaaaaacctttccaatgtaatgagtgtggcaaagcctttaattatagctcacatttaagaagacatcatgtaacccattcaggagagaaacaatataaatgtgatgtatgtggcaaagtgtttcatcaaaagcaataccttgcatggcaccatagagttcatactggagaaaaaccttacaagtgtaatgagtgttccaagaccttcggtcacaagtcatcccttacacgccatcatagacttcatactggagaaaaaccttacaagtgtaatgagtgtggtaagaccttcagtcagacgtcatcccttgtagggcatcgtagacgtcatactggagagaaaccttacaaatgtgaaggatgtgacaaagtttacagttgcagatcacaacttgaaacacataggcgaattcatactggagagaaaccatacaaatgtaaggtttgtgacaaagcttttaggcataattcatgcctttcacgccataacagagttcatactgaagagaaaccttacacatgtaatgaatgtggcaaggttttccagcgtgattcataccttgcacaacatcagagagttcatactggagagaaaccttacacatgtaatgaatgtggtaaggtttttaatcaaaaagcacaccttgcatgtcattataggcttcatactggagagaaaccttacaagtgtaatgagtgtggcaagaccttcagtcagaagtcatcccttgtgggccatcgtagacttcataccggagaaaaaccttacaactgtcatgagtgtggcaagacctttgctcgaaattcatcccttctaattcataaggcaattcatactggagagaaaccttacaagtgtaatgaatgtggcaaggtttttaatcaacagtcaaaccttgcacaacatcagagagttcatactggagagaaaccttacaggtgtaatgagtgtggcaagaccttcagtcatatgtcatcctttgtataccattatagacttcatagtggagagaaaccttacaagtgcaatgagtgtggcaagaccttcagtcatatgtcatcctttgtatgccatcatagacttcatactggagaaaatccttataagtgcaatgagtgtggcaaagcctttagtgggcagtcatcacttattcatcatcaagcaatccatggtatagggaaactttacaaatgtaatgattctcacaaagtcctcagtaatgctacaagcattgcaaatcattag

SEQ ID NO: 177 - DNA, 1119 bp, Homo sapiens
  CDS (118)..(603)
gggggtgggggcgggtggttgcctgcgggaggccgccgcgggtcatgtgaccggaagggctcctcacggacgccgtccctcctcggcgcggcctgagcgcccggcccgaccccggccatggggtgctgctacagcagcgagaacgaggactcggaccaggaccgagaggagcggaagctgctgctggaccctagcagcccccctaccaaagctctcaatggagccgagcccaactaccacagcctgccttccgctcgcactgatgagcaggccctgctctcttccatccttgccaagacagccagcaacatcattgatgtgtctgctgcagactcacagggcatggagcagcatgagtacatggaccgtgccaggcagtacagcacccgcttggctgtgctgagcagcagcctgacccattggaagaagctgccaccgctgccgtctcttaccagccagccccaccaagtgctggccagtgagcccatcccgttctctgatttgcagcaggtctccaggatagctgcttatgcctacagtgcactttctcagatccgtgtggacgcaaaagaggagctggttgtacagtttgggatcccatgaagagaggggtccttggacagctcttctcctctcttcatcccatctctaccccacccccttggcccccagcctcactgcggcttatacagtaccctaacctgctactaatcacagagaaaaatgtgaagaaggaggagaagaggaaggctagaagcctgagcaagtgagggtagaaccttttgggactggcctttgaagctctggccagggatggggtgggggccaaaaggacagatcctggtatgtcttcatagtcattgagaatgtggagatccccttttgggtgctgggtgatcaccaggggaacctagggagatccccttcccaccctcgtctgttcggcctcacgagtcactcctagccccctactcccatgacttcggtgcttcacatgcacgctcacgtagggtatcgtgaccagggtctgggatgaacttgaatttgaatgaattgagtttgtatttctagaaccctggggtttcacatgtttggtcttttgttgttttggtttgtcac

SEQ ID NO: 178 - DNA, 3697 bp, Homo sapiens
  CDS (267)..(1649)
cgtgcatgcgcgaccggtccggaattcccgggtcgacgatttcgtggcagctccttatgcagcttaagcctgtcctgtggaacatccctgtgggagactgtgaccagaccaagcgacacggatcctgagagcgctcccgggtaggcatttgccccggtgggacacctcaccacaacagtgtgtggcaggcccccgtggagaatcaacgcagtggctgaacaccgggaaggaatgggcacttggagtctggacatctaaaacttgaaatggcggctgcggcggctcgagtggtgttgtcatccgcggcgcggcggcggctctggggtttcagcgagagtcttctaatccgaggcgctgcgggacggtcattatattttggagagaacagattaagaagtacacaggctgctacccaagttgttctgaatgttcctgaaacaagagtaacatgtttagaaagtggactcagagtagcttcggaagactctgggctctcaacatgcacaggcaccaagaagagatcccagttagatctggaacttgagattgaaaatatgggtgctcatctcaatgcctatacctccagagagcagactgtatactatgccaaagcattctctaaagacttgccaagagctgtagaaattcttgctgatataatacaaaacagcacattgggagaagcagagattgaacgtgagcgtggagtaatccttagagagatacaggaagttgaaaccaatttacaagaagttgtttttgattatcttcatgccacagcttatcaaaatactgcacttggacggacaattttgggaccaactgaaaatatcaaatctataagtcgtaaggacttagtggattatataaccacacattataaggggccaagaatagtgcttgctgctgctggaggtgtttcccatgatgaattgcttgacttagcaaagtttcatttcggtgactctttatgcacacacaaaggagaaataccagctctgcctccctgcaaattcacaggaagtgagattcgtgtgagggatgacaagatgcctttggcgcaccttgcaatagctattgctgctgttggttgggcacatccagatacaatctgtctcatggttgcaaacacgctgattggcaactgggatcgctcttttgggggaggaatgaatttatctagcaagctggcccagctcacttgtcatggcaatctttgccatagctttcagtctttcaacacttcctacacagatacaggattatggggactgtatatggtttgtgaatcatccactgttgcagacatgctacatgttgttcaaaaagaatggatgcgactctgtacaagtgtcacagaaagtgaggttgcacgagccagaaatcttctgaaaacaaacatgttgttgcagcttgatggttcaactccaatttgtgaagatattggtaggcaaatgttatgctataatagaaggattcccatccctgagcttgaagcaagaattgatgctgtgaatgctgagacaattcgagaagtatgtaccaaatacatttataataggagtccagctattgctgctgttggtcccattaagcaactaccagattttaaacagatacgcagtaacatgtgttggcttcgtgattaaaatgctcctaatcaagattgtttgaacacatgtatttataaaacagagctagagaaaaataaaaatgaacatgtatatacatttggaaatttgaattaaatactgtatcatactttcaaaggataaaaagactacccctctgaaggttgttttgtattaatggtcagtctttgttctctgagaaattatgttggaagcagcatactttcaaattattaccatgagtataattttaagaatgaaaatgtttacagtattttcagttttattataaaaatgcacacacaacaaagattgtcatttcttggctctacttgcattcagcacttgttcttgagcagctttctttgcttttaccatctcgacaagttccttgtatcgtttcatgcagtccttctttgtcctgccaggcaccgcttctgctattttttcccatctttcaggtgtatttactgggtatgttttcaaagcttgttccaaaagcttctgttcttctgttgtccaaggggtgaagtctgtatatggaccttcaaatcgttctgaaggcgttgcgttgtctgcttgaggtaccactccatgttcttttttgaacttatcaaatgcctttttatttatgtcatctttttgatgagggtcaagtttttggagactctttgctttgccaataacatctttggcagttcttttgactccagaggaagaatgtatgttcatgtaattagcaataacttcccatcttgaatttgttctagcagggaacagattcacagctttaattagtaattgtagatcatcttctgaccaatttttacttccatttccacctccaccagttgatttctctgtgttcttagatgcttgtcgcatacgagcctcagcttcctctttctcttttctgatttgctcatttatttcttctatcttgcatgagtttcgaagtttttgcctttccttcttaatggcttttttctggatatctttttccttctttgccagcaatgcttgctgtctgacttcctcctcttctttctccttagctaaccgagcagcttctaattcagcttgtctttgtttttctttagcttcttgctccttccgtttagcttctgcttttgctttcttttctgcttctttcttggctttttcttcttccttgaacttttttatccttggatcacagctgtatgcattgtcaactaatgttcttattctgttcatttcttctttttttctttgtgctcttgttgctccgttctgcttttcaatccatctcctctcatcacgacattctgctttttctttttcttcttcatctaaataagaaaattctctccaagaatcaaaattataccagaaagaataaaatatatctacatcttcaaatgatgaattcatatcaccaagtttaggaacattttttttatttgaccatctggaattcctttcaaacactggggtaaacacttcgaagaaattatcctttgcttcacttttagaaggaactgagttatcaaaagtaggatctacactgttaaatgctcgtcttttcactggatcagataacatttcataagctttagttatgcaagtgaagtagtcattatctccttcttttattggttcaccagctgctttccgtttgtctgggtgatgttttaaaaccattgctttatgagctgctttgatctgtctctgtgtagccttgtatctcacatggccaagtccaagaactgcataatgatcttggttcttccagtctttgggatcaagtgttttcagcatgggaaactcttccaactgcaattcttcatcttctgattcctcggataactctttcttatcctccagttcctgaaaagaggcagaagcatttctgtttctcctcttaacaaaagcttcaaaccatcttcccacaggttcaacttgacagagtgtagaggcagaggtcagagcgtgggtgatggcggtgccccggccgtccgcggcgcttggcagaagcagcatgatggcgccgggtctagcccggtgggcgcagcggctcacgtccc

SEQ ID NO: 179 - DNA, 1071 bp, Homo sapiens
  CDS (763)..(1056)
acatcctgggtcgacgggaggcaggaggtatgagggcaaaagtggtgagagaagcagatgagcttttctaggacatgcttgctcaggagaagggaggcagagcgtataagaacatactgagcctccttgccactttcgacgttcaaccaatatttgttaggcactaaatatacatgcaggacacttttctgtatgttgtttcatttaattcttaaataatcctttacagactcagagaggtgaagagagtagcacaggtagtatcagaattgggattcaaacctgacacatacactgagcactaagttaaaaccgggcactgggcagctgctgaggatgcgatggtgagtacaacagactgcttgctctttttgatatctagaatcttacagctctgctgtgctcatccttgtctgttgtcatttactagttgacatcttcgttgactacctagaagcagctgcttcgacatctatcccaacctgaatcccgtcaaagggagattacaacaaatgtgctttttgtctatcatctctagctagtgtttcacagtggggggagtatcatttcctgggtgactttgcatagagcaagctccccaaaggccaaggaatactcaatctagattcttccaatcctccggtacccaccaagtcaaaagaattctggctccctgtagcttcatctaagtgcttttctgttagaggagaaaagtgaggaaagcgatgctctttcaataagttcggcagggtggggcaaggaatggtacaaattgattttttttttttcttgagacagagtctcgctctgtctcccaggctggagtgcagtggcccggtctcggctcactgcgacctccgcctcccggattcaagcgattctcctgccttagcctccaaagtagccgggactacaggcgtacgccaccactcccggccaatttctgtatttttagcaaagacgggggtttcaccatattggccaggctggtctcgaactcatgaccttgcgattcgcccgcctcggcctcccaaagtgttgggaccacaggcgtaagccaccgcgcccgcg

SEQ ID NO: 180 - DNA, 660 bp, Homo sapiens
  CDS (161)..(337)
ttttaagagacaaggtctcacccaagctagagtgtatggtgcaaggaacctgtgagctcaattcatcctacctcctcagcctcctaagtagctgagaccacaggcatacatcaccacacccagctaattttttctgtttttgtagagatgaggtctcactatgttgccccaactccttgcctcaaggaatcatcctatcttggccttccaaagtgatgggattacaggcatgagccactgtgcccagatagcttactcatctttactgagcagcttcctcctctgtaaaatgaaagataacattaatagtacttgtcttgcctactttaccagttagatgtgaaaagcaaatataatagaacacagaaagcaaactgagggcataaagcaaactcttagtctatgtattcctatcatgatcttacaatagattcaaggttacattcaaagagggaagatgaaccaaatgtccatcagttaggattcttcctatagtattaataacacaagtttctttagattctctgcctttgttcacagttcactgtttcatcagaggtgaacatgaatcagaattgtttgcatattccagtagagagcctggcttagtctatatttctatataatttaaatcgggctcgtgccgaattccgcaggcgg

SEQ ID NO: 181 - DNA, 1471 bp, Homo sapiens
  CDS (114)..(980)
atttggccctcgaggcaagaattcggcacgaggcttacataaagggacaattggagcctgagaggtgacagtgctgacactacaaggctcggagctccgggcactcagacatcatgagttggtccttgcacccccggaatttaattctctacttctatgctcttttatttctctcttcaacatgtgtagcatatgttgctaccagagacaactgctgcatcttagatgaaagattcggtagttattgtccaactacctgtggcattgcagatttcctgtctacttatcaaaccaaagtagacaaggatctacagtctttggaagacatcttacatcaagttgaaaacaaaacatcagaagtcaaacagctgataaaagcaatccaactcacttataatcttgatgaatcatcaaaaccaaatatgatagacgctgctactttgaagtccaggaaaatgttagaagaaattatgaaatatgaagcatcgattttaacacatgactcaagtatccgatatttgcaggaaatatataattcaaataatcaaaagattgttaacctgaaagagaaggtagcccagcttgaagcacagtgccaggaaccttgcaaagacacggtgcaaatccatgatatcactgggaaagattgtcaagacattgccaataagggagctaaacagagcgggctttactttattaaacctctgaaagctaaccagcaattcttagtctactgtgaaatcgatgggtctggaaatggatggactgtgtttcagaagagacttgatggcagtgtagatttcaagaaaaactggattcaatataaagaaggatttggacatctgtctcctactggcacaacagaattttggctgggaaatgagaagattcatttgataagcacacagtctgccatcccatatgcattaagagttggacttggaagactggaatggcagaaccagtacctgggacaatgacaatgataagtttgaaggcaactgtgctgaacaggatggatctggttggtggatgaacaagtgtcacgctggccatctcaatggagtttattaccaaggtggcacttactcaaaagcatctactcctaatggttatgataatggcattatttgggccacttggaaaacccggtggtattccatgaagaaaaccactatgaagataatcccattcaacagactcacaattggagaaggacagcaacaccacctggggggagccaaacaggctggagacgtttaaaagaccgtttcaaaagagatttacttttttaaaggactttatctgaacagagagatataatatttttcctattggacaatggacttgcaaagcttcacttcattttaagagcaaaagaccccatgttgaaaactccataacagttttatgctgatgataatttatctacatgcatttcaataaaccttttgtttcctaaaaaaaaaaa

SEQ ID NO: 182 - DNA, 1781 bp, Homo sapiens
  CDS (211)..(1446)
aagtaattcggcacgaggcagtcaaatgcagtctggcttcttggacatcttcatctatctactctatcctcaagtcaaagtagagcctctgttcctactgactatagctacttgcctgaaagcagttttattggagcagctattggcttcttcattacaggaggaaaaaaaggtcctgaatctgtgcctccttcccttcttaaagtagtgatgaaacccatagcaactgttggagaaagctaccaatatcctcctgtgaactgggctgcacttctctctccacttatgaggctaaattttggtgaagagatccagcaactgtgccttgaaattatggtgacccaggcacagtcatcccagaatgcagctgcactattgggcttgtgggtgacaccaccactgatccacagtctgagtctgaataccaagagatatctcctgatatctgcacctctgtggataaaacacatctctgatgaacagatcctgggttttgttgaaaatttaatggtggcagtttttaaagcagcttccccacttggaagtcctgagctatgcccaagtgctttacacggtctgagccaggccatgaaactgcccagccctgcccaccacctctggagtctgctctctgaagctactgggaaaatttttgacctcctgccaaataagattcggagaaaggatctagagctgtatatcagcatagcaaaatgcctcttagaaatgacagatgatgatgccaatcggatcgcccaggttactaagagcaacatagaaaaagctgcctttgtcaaactgtacttagtctctcaaggacgattccccttggtgaacctgaccgatatgctgagcgttgctgtgcagcaccgtgagaaagaggtgttggcctggatgattctgcacagcttataccaggcacggattgtgagccatgccaatacgggcgttttgaagagaatggagtggctcttggaactgatgggttatattagaaatgttgcttaccagtcaacatcctttcacaatacggctcttgacgaggctttggacttcttcttgctgatatttgcaaccgcagtggttgcatgggctgaccacactgcccctctcctcctcggcctcagtgccagttggttgccatggcatcaggagaatggcccggctgggccagtaccaagcttccttggcaggagtccaatgcacagggtcactctgcaggaggttctcactctccttcccaatagcatggctctgctgctgcagaaagagccatggaaggaacagacccagaagttcattgactggctattcagcatcatggaaagccctaaagaagccctctcagcacagtccagggatcttttgaaagccaccctgctgtccttgagagttctcccagagtttaagaagaaagctgtatggaccagagcatatggttggtgaacagttttgcagtaaccagcagcattctcagctggatgaggaaaaccatataagtggaagaagtttttcagaattcatgcctggtattgctgagacatgatgcagagagttaagggtcatgaaaagatggccacatcactgacagcttgacacatgcctcctaagagaggagtgcattgctttagtacccgggccagttgagactgaaacaggaacttggattttctttatttggcttgagttcaatgtggagattttctttgtgaaagcttgaagatattatcttctccctgctaaattccagtaaaataatgttgtcaatttaaaaaaaaaaa

SEQ ID NO: 183 - DNA, 829 bp, Homo sapiens
  CDS (45)..(290)
ccgagtgaggcgacggggtaggggttggcgctcaggcggcgaccatggcgtatcacggcctcactgtgcctctcattgtgatgagcgtgttctggggcttcgtcggcttcttggtgccttggttcatccctaagggtcctaaccggggagttatcattaccatgttggtgacctgttcagtttgctgctatctcttttggctgattgcaattctggcccaactcaaccctctctttggaccgcaattgaaaaatgaaaccatctggtatctgaagtatcattggccttgaggaagaagacatgctctacagtgctcagtctttgaggtcacgagaagagaatgccttctagatgcaaaatcacctccaaaccagaccacttttcttgacttgcctgttttggccattagctgccttaaacgttaacagcacatttgaatgccttattctacaatgcagcgtgttttcctttgccttttttgcactttggtgaattacgtgcctccataacctgaactgtgccgactccacaaaacgattatgtactcttctgagatagaagatgctgttcttctgagagatacgttactctctccttggaatctgtggatttgaagatggctcctgccttctcacgtgggaatcagtgaagtgtttagaaactgctgcaagacaaacaagactccagtggggtggtcagtaggagagcacgttcagagggaagagccatctcaacagaatcgcaccaaactatactttcaggatgaatttcttctttctgccatcttttggaataaatattttcctcctttctatggaaaaaaaaaaaa

SEQ ID NO: 184 - DNA, 6170 bp, Homo sapiens
  CDS (394)..(978)
tacattgcgacaccgcaacggaattcccgggtcgacccacgcgtccgacgaaatcatctcaagcacagacaggagactttgttttacatgataaagcagcgggaagattttgaaccctttgtagaagatgacattccttttgagaagcatgtggccagtttggcaaagcctggtacttttgctggcaatgatgcaattgtagcctttgcaagaaatcatcagttgaatgtagtgattcatcaacttaatgcccctttgtggcagattcgtggtacagagaaaagcagcgtgagggagttacacatcgcatatcggtatggagagcactacgacagtgttcggaggatcaatgacaactcataggcacctgcacatctccagacggattttcagatgcttcatcaagatgaatcaaataaaagagaaaagatcaagacaaagggaatggactctgaagacgacctgagagatgaagtagaggatgctgtccagaaagtttgtaatgcaactggatgttcagattttaatttaatagtccagaacctggaagctgaaaattataatattgaatctgcaataattgccgtgcttcggatgaaccaagggaagagaaataatgcagaagagaatcttgagcccagtggtcgagtgctgaagcagtgtggccctttgtgggaggagggtggcagtggtgccagaatctttggaaatcagggcttaaatgaaggcaggaccgaaaacaataaggcacaggccagccctagtgaagaaaacaaagcaaataaaaaccagctcgcaaaggtcacaaacaaacagaggcgagaacagcagtggatggagaagaagaagcggcaggaggagaggcaccgccacaaagccctggagagcagaggtagccacagggacaataacagaagcgaagcagaggcgaacacgcaggtcaccttggtgaagaccttcgccgctctcaacatctgactctttggcctcttgggagttgtaagaagcggctggaaaaggattgctgtgtgctagactttccagtgaggccgtccttttataaaacgcaacacaaccaacgaagcccacacatgagctcacacactgagttagtttcgttcaagctgcctctttttttgttcgaagttttattagtgatatgttggtgttttatgaaaatgcagtgaggccattcatattctgtaatacaaaattaaaatactgagttttaggggcagatagttaggtcaggaaaaaccttttaagtggtggctttatttgccctgaaaatcagacttcagtgaccctaggatctttccttaacatttggggtgagttttgctgtaattgttcatgagtagtttagaataattgttagaaattcagaatgacaagtttccttagtttctctttcattctcaaacagatatatagggtagcttataaatgatctccaactcaggaatatgctttgatttacttctaatccaagttactcagaaaataattcaggaattgttttcccaaagttacgtgagggttgtggcctgcagtcaggatggaaattaaccgcatttctctccttcctgattctgatgttatttcagatgggatgcaggtgctgttagttcatttgcactcaagccatatgataaatgcagctgactgttaattaggcctggccttgttgggaagttgatagtggtgttgggtttttggtatttgtttcctgacagtggggagatggcatgttactgcttgtgatacagttctggaattctgatagtgtgtagagcagggtctatagttgtaacaggagacgaactcctggggttttgcctaagaggagtctaaagaattatgtttttataggagaagcctggaagaataaggtttttcatgttcgcattttaaataacgattttcttcccttctgttgtagacttagatgccttcagagagatacgtggtaacttgaccttataggtcgctaaacttagtattgtggaaattaaatcttataaaatgctacatttatttctttttatttaagccctgtttggtatttcaaagttgggaaaactccagcatctgctggaagttgttggaccagcagggttggttgacttaggttggaccagcagagaagagaacatactttggttgaggccttcgaatcactcttcagttctgaaatagacagacttgagcagtggagagacgtctttcctaaaactgagttaggtggatgtgaacttaagaactataacgtatgaggcagcccatcttggatcatctttgtcttttgggacctaatacttgggcaaataattgatgctgagttgaaaggtaaattattagttatcttccccacccctcgcatttcagaattataaaaattcggaggcaaattgaaaactaaaatgtttggtaggccctggagtcgccagattgtctttatcaccaggcctttggctttcttcagtttcactggtatcttttggttttgtttttgactttggtggctttttgtagttggagcatcagtagtctcttggaattgctcctaggacattgtggtttaggtttcttcctgggtacagtacattgtaaaatttagcagattaaaaaaagtacacagcattttttttctgtgcacgtcgcagagtcctgagcttgaggctgtgttactctactcattccaaacgaatgaaagatctctgttgccttactctaaggaagtgggatcgagtgcgttaggatctatggttgtcttggttttcaactctgggcagattcctgactggctgagtgtttctgaatgaagatgttttcctgtctgttttgtactgcttgagtgcagaggccagatcctctcagaaagataagattgtatgccagaaattcagattagcagtcagcttaagagagacttattgtcagaagtagtagaattgctttatttacttggttaatgaaggtggccttgggccctattgggttttagaagttttagaagctgctaaaaagttattaaagaatattgggaacatttattttttaaattacctaattctggtaataggcttcagcatttctggagtataataatggtggtttaaaaaactaatcaaacggctttagtaattttactactggtttcacagcttttcagttacagttggtctgtttagtgtgttaattattaggaatcgggtacatgcatccaacttcagtgataccttctagctaatggtttcaatttagacttcactgcctcagtctcactgggtacatgagaaggttggaatcaacatgcttagttgcctcagtgggcacttgaaaattccttcactggcagcccgagtggaggcccagtatgtctagtcctgggatgactgttgtcagcagctgttactctagtacaggtgctcctgtgaactctttattaggaactgaatgtgtcttaacctctgtgttacatcttggctggcagagatttatgttacatgagattgtcttggtagcttgtagtgtggtcaggagaaaggggatggagcagtggtgcatagctgcttactgctcttataaacggtatataaaggttttacggattttgaaaatatttttttttagaggtcaaaataaataccattttagtggcaacagctttgaactagagaggtagatgtattaaagcagcatagaaccataacttctagataatgtagttgccactaggagatattagaaagttagaatgtatgtgtgtatttagtttttcaataataatgaacatacactttcaggagcaaagtatggttgagaaattgtggcagaaagaattttaaatgttagtcgaagttgtctgtagtttctttattaagctctgaaaacacttccaatgccagtttgattctgagggcttgggaagtgggatctcccttgtggagcagctggagctggctgggagggagcctctccatgggtaatttattatgcctgccctgcttcccccagggagctgcttcagtgtgaaatgatgtgattgtcgggggtggggtgggaggagggccaccttcagtcggggagttgctcacatattacacaggtagcatcaggtggacttcagcgctgaactgtactagtagtgagtccctgtagtcaatgtgcaatttctctaattctgagaaactctgtagactctgcctgggttttactgggtcagcatagaatgctatcagtttacctctgtgaaatattcagtcagttgaaggaaacttggattcctagtcagaggtgactaaaagttaccctgaccaaaaggatctctgcggggggaagagaatggagcttcctgattttaatgtgttgcgtcagtggccctcttcgactcccgttttgggtagatgcgtagctcttcactttcttacctcaaggctctgtctagccatgttaaatctttagactcagtctgatgccgtttttctgttttgccattctcattattcacagctttcagaacaagtgttgctaaaactccggggcctttgacagttgttctgaggtgatttaataatggactttttataagttatgttttcctggctctaaagtaaatttttttttttttttttttttgagacagagtcttgctttgttgcccaggctggagtgtggtggggcaatctcggctcactgcaacctccacctcccgggttcaagcgattctcctgcctcagcctcctgagtagctgggattacaggtgtgtgccaccatgcttggctaatttttgtatttttagtagagacggggtttcaccatgttagccaggctggtctcaaactcctgaccttgtgatctgcccgcctcagcctcccaaagtgctaggattacgggtgtgagcaaccctgcccggccagtaaattgtatttttttaatgacatcattgatttgaagatctagatggcataaattacgacgtctgccatcgcatattagaaaggggacagtcatatttgtaacgtggagagaacacggagcaccagtcaccacgtgcacttaggatgcagagcttaccgcacaccgctgatggggacctccggaaagagcggtgccttgtggttggcctggaagttctctcccaaggtgaaattcctttaaaacctcaggctctgacctatgtctttgaagcagctgctttgtagagtccctctctttactgtcctcgttaggactgttttgtggttccatgaaaatgtttagcatccttgcagaattacttgagaaggggctggtaccagtgtaaagaatctatttctgtaaaactacgaacttttgcatagggaatttattctaagcaggtcatagccgtgatccagagctgctgctgctcactgccagtccttgcggctggcggcgattgccggacagactctctgtggcctggctctcatccttggcgtgtcagcctgcggcaggctgccagccatccatgacaatcatgtgagctcagccacagacctcagctggcggtttgatccctggcaggtccctcgagcagtactggtaagaggcttcacacattttcccactcttacagttcatttttcatagtaggaagggcccttggcctccccagtgcctcttccagagcctccaccagcactaagctcagaggaaagaagaaaagggccaggagtcagacgtcacacccgggggctcccctttcccatgtagaagtgttggcatgcgtcagtctcctttacagaggggtggatgtatccgtggaggaggggccttctctctttctaattgcactatacttgttctagcttcagtctggagatacttaagacctccatggggtcgtgatccatagacttagcaagtcttgccttatctatggagctcgatggtgagaattgtgaccattgtctgatgtccatagttccttccccctagattgtttctttccacggattgtgttcatctgaaccattttattttttatttaccaaagtactgtacttggctatttgcagtgttttcaaaaccaaatgtttctttttttgtgtttttaatcttcgatacttggtgcaatagaagctgcaaagatgtgccactttatctatgaaatggagttttgtataccaataaattctagttt

SEQ ID NO: 185 - DNA, 683 bp, Homo sapiens
  CDS (244)..(672)
cgaattcccgggtttctgcaagtcggaagggaactcccttagatcccgcccagaacctggaattccagagcacacagggccaggacacctttgtacccctgctccccaccggcacaggtcccacccacccccttctccccgccccatgcccgggtggagccagctgccagggcgccaagactcccagccctctctctgtgcacggcagagtagaggccaagggagggctctgtgccagccccgatgaggacgctgctgaccatcttgactgtgggatccctggctgctcacgcccctgaggacccctcggatctgctccagcacgtgaaattccagtccagcaactttgaaaacatcctgacgtgggacagcgggccggagggcaccccagacacggtctacagcatcgagtataagacgtacggagagagggactgggtggcaaagaagggctgtcagcggatcacccggaagtcctgcaacctgacggtggagacgggcaacctcacggagctctactatgccagggtcaccgctgtcagtgcgggaggccggtcagccaccaagatgactgacaggttcagctctctgcagcacacaagaagacccacagcattcatcacattctcaaaggagtctgtaaaccagcaaagctaccctcaagccacctgatgtgacctgta

SEQ ID NO: 186 - DNA, 1567 bp, Homo sapiens
  CDS (362)..(1567)
ttcccgggtcgacgatttcgtcgcgcaccggcggcagagtcccttgcgtggattggcaagcgacgccccacctgccccgagctcaccattttctttcgcgctggctgcagctgacccggcgaagggagccgaccgggccctgggctggaggtaaaaccccacggaaagaacatgaggttcccttggaaatcattcaagaggaagatggaaggggctgtttagaagagcttaaaagctacaggctgtaagactggggcctgagtgctggcagtggaaaacactgttgggctgtgatctctccctgaaaagttccaggtgcctcttcgcttcctgcaaaagaaaggaagcgaaagagaagaccatgtccatagccctgaagcaggtattcaacaaggacaagaccttccgacccaagaggaaatttgaacctggcacacagaggtttgagctgcacaaacgggctcaggcatccctcaactcgggtgtggacctgaaggcggctgtgcagttgcccagtggggaggaccagaatgactgggtggcagtacatgtggtggacttcttcaatcggatcaacctcatctatggcaccatctgtgagttctgcaccgagcggacctgtcctgtgatgtcagggggccccaaatatgagtatcggtggcaggatgatctcaagtataagaagccaacagcgctgccagctccccagtacatgaaccttcttatggattggattgaggttcagatcaacaacgaggaaatatttccaacatgcgtggtgaattctcatgtatcctttgaggttcagctcagataccatgtcctctgtgaaggctttcatccattagaataccagctctttaaattatgcaatatgtctaattcatctgactatcacccactaactctagtcctggtaactttcaagttattggatggatggatggatggatggatggacggcctgggaattctactacagttaacaggaagaaaagaagttgctaaatattgcggacttacctattatggccctcagataagccatccatatttggcatctcaaagtggaaaagaaaaagcctgcagccaggggcatttgtcttcccatgtttttgaagagaaatgtgagcaaatgtgtcaacgagaaatggaagaagaggaagctaacgttgagcaatgtgatatagtaagctccagagcccacactctagaaatggtagatttgggagtcaaaatcgggcagtctgatctcagatccatttacttaacgaccagtctatacaacacagtgaccaagagccacaaagcgcaggggtggttcattgaactagcctctccacaggaaatgacttttggcccatggaccactggatatgccaggccaggcatgtcagactccctggctcagggagctcttaaatcctggagagcagcagagtccacacatccactggccatgtcagagatcttcatggctgccccacccatcacaggcccagaggcccagcaggaaaaagtggttttgtgggccggtcccaggatccccgtgctgtatgcagcctag

SEQ ID NO: 187 - DNA, 1223 bp, Homo sapiens
  CDS (325)..(1152)
gatgactagatgtcagagctggctcccggttgggatatgagtgactttgtggaggatggcgcctaaatgaggcatgccaatttccgcaccagggtgacgaacataagggctcctaaaaggctagcccaatgtatctgtatttccttggggattaaaacccatgatcttcagttcctcagagaactgaaagttgcaaggagaaatccagtaattcctgttatctgcaggctttataagtcagtggagcctgcggaagtggccagaatccagcactccaagcactgctgtcttctcacagagtcttgaagccagagcagcgccaggatgtcacgggagctggccccactgctgcttctcctcctctccatccacagcgccctggccatgaggatctgctccttcaacgtcaggtcctttggggaaagcaagcaggaagacaagaatgccatggatgtcattgtgaaggtcatcaaacgctgtgacatcatactcgtgatggaaatcaaggacagcaacaacaggatctgccccatactgatggagaagctgaacagggaaaagctggtgtctgtgaagaggagttatcactaccatgactatcaggatggagacgcagatgtgttttccagggagccctttgtggtctggttccaatctccccacactgctgtcaaagacttcgtgattatccccctgcacaccaccccagagacatccgttaaggagatcgatgagttggttgaggtctacacggacgtgaaacaccgctggaaggcggagaatttcattttcatgggtgacttcaatgccggctgcagctacgtccccaagaaggcctggaagaacatccgcttgaggactgaccccaggtttgtttggctgatcggggaccaagaggacaccacggtgaagaagagcaccaactgtgcatatgacaggattgtgcttagaggacaagaaatcgtcagttctgttgttcccaagtcaaacagtgtttttgacttccagaaagcttacaagctgactgaagaggaggccctggatgtcagcgaccactttccagttgaatttaaactacagtcttcaagggccttcaccaacagcaaaaaatctgtcactctaaggaagaaaacaaagagcaaacgctcctagacccaagggtctcatcttattaaccatttcttgcctctaaataaaatgtctctaacagaaaaaaaaaaaaa

SEQ ID NO: 188 - DNA, 653 bp, Homo sapiens
  CDS (62)..(340)
gttctgaagcttctgagttctgcagcctcacctctgagaaaacctctttgccaccaataccatgaagctctgcgtgactgtcctgtctctcctcgtgctagtagctgccttctgctctctagcactctcagcaccaatgggctcagaccctcccaccgcctgctgcttttcttacaccgcgaggaagcttcctcgcaactttgtggtagattactatgagaccagcagcctctgctcccagccagctgtggtattccaaaccaaaagaggcaagcaagtctgcgctgaccccagtgagtcctgggtccaggagtacgtgtatgacctggaactgaactgagctgctcagagacaggaagtcttcagggaaggtcacctgagcctggatgcttctccatgagccgcatctcctccatactcaggactcctctccgcagttcctgtctcttctcttaatgtaatctcttttatgtgctgtattattgtattaggtgttatttccattatttatattagtttagccaaaggataagtgtcccctatggggatggtccactctcactctttctctgctgttgcaaatacatggataacaccgttaattccatgtgttttcataataaaactttaaaataaaatgcaaaaaaaaaaaa

SEQ ID NO: 189 - DNA, 1266 bp, Homo sapiens
  CDS (974)..(1138)
ctggaagaaccaagatgtaaagcccttaagaaaatctcaatatacacatgtctacacagtcgtatacagtgtcatgccacaaatgcaggcgctggacctcattccttgttaaaggttttgtcatatcaggttatgaagtaagattattatgtcattattgtaaatggcagcttaagtattccgttgcagggggcgccataacctactacgttctctggccttagggagtaaagttgttaagtgtttttctctattgtagacacaacaaatgaatagtgtttgtcttggtcaagactgactcctactcccgcctcctgccctattacaagcagctcacaccttttggaggctctggagacgcctgtccagcgagctccgagattccgggtgctgaacttccggttttacttagcctagttgctgtaattacttctcttgaaaagcaaaagggcaatcttaattgttaaatgctcttataaagtacatactctgggatccttgtaagatgattgtactgcaacctttatgcactttttacttctttctctttttgttctttaatttgtttgtgtaacagagtaagcaggaaattcacaggaggtctgctcggctcagaaacactaaatacaaatctgctccggctgctgaaaaaaaagtctccaccaaaggaaaagggagaagacatatatttaaattgaaaaatcccatcaaagctcctgagtcagtttccactataatcactgcagaatcaatcttctacaagggagtatattaccaaattggtgatgttgtttctgtgattgatgaacaagatggaaagccctactatgctcaaatcagaggttttatccaggaccagtattgcgagaagagtgcagcactgacgtggctcattcctaccctctctagccccagagaccaatttgatcccgcctcctatatcatagggccagaggaagatcttccaaggaagatggaatacttggaatttgtttgtcatgcaccttctgagtatttcaagtcacggtcatcaccatttcccacagttcccaccagaccagagaagggctacatatggactcatgttgggcctactcctgcaataacaattaaggaatcagttgccaaccatttgtagttcacaaattaaaactgggtttccaggcctggtgtggtggctcacgcctgtagccccagctattgcaccactgctctccaagctgggcaacagagtcagattctctttcttaaaaaaccacaaaaaaa

SEQ ID NO: 190 - DNA, 704 bp, Homo sapiens
  CDS (160)..(423)
ctaggtgcttacctaaatcaactcattggatcctcacaacaaccctgtgaggtgggtttcataacccccactgtttaccgatgaggctcacagaggctatgtaacttgcccaagattctgcagctggtaaaggacggaatctgtgcctctgcactaccaatgcctgctcctgaaggaaggtttgtgagggtgaatttctcaaagtcacttcaggtccttactgtagcgacagtgttggcaccttctgtgtcctctctcaccttgcctgtgagccttccagtgggtgggaaaagaggcgtgcctatcagtggccattctgtgaacacagaagagagctgcgctggccacagagaagatagtccaatgatccttaaagttcaggcgtgtgggttggagccaaaggggcctgtcccctggatataacttgagagtagctctggagaggaattctagaagcaccacaagggctgaggagagtcccaaggtgccagagaaattgtagtgaaatatcacagagagttcttgctgaaagacactcagatgtcctggggcttgtgtctactgtactgcggactgactactcctcttttcttcctttgaaaaacttatccttgccttctcagatcaatccaagggggttcctggggacagctggtccaacacgctcaaatgaagaaagtcggacgcgtgggtcgacccgggaa

SEQ ID NO: 191 - DNA, 2013 bp, Homo sapiens
  CDS (1006)..(2013)
atacgagcactatagggaatttggccctcgaggcaagaaattcgggcacgaggtgaaaacacaacccacaatcatcctcctgaggcagattccgctgggactgcattcaacttagggccaactattaagcaaactgagacaaaatgggaatacaacaacgtgggcactgacctgtcccccgagcccaaaagcttcaattacccattgttctcgtccccaggtgatcagtttgaaattcagctaacccaacagccacgttccctcatccccaacaacaatgtgagaaggctcatttctcatgttatccggaccttgaagatggactgctctgagacccatgtgcaattgacctgtgccaagctcatctccaggacaggcctcctgatgaagcttctcagtgagcagcaagaagtaaaggtgtccaaggcagaatgggatacggaccagtggaaaactgagaactatatcaatgacagcacagaagcccagaatgaacagaaagagcagaagtcgagtgagctcacaaaagaagttccaggatacggctatactgacaaactcatcttggcattaattgtgactgaaatactaacgattttgattatacttttctgcctcattgtggtttaggattgggtgtgtgtgtctcctctctgaatggcactcaaatgtttgctgactcctactctgcgtgactggggtgtacagctatggactgatgcatcccatcccatcatctttcacgagcaaagcagtctcttttttgacagctgaagaagaatctgtagggaatccagaaggagcattcatgaagatgttacaagcccggaagaattacacaagcactgagctgactgttgagccggaggagccctcagacagcagtggcatcaacttgtcaggctttgggagtgagcagctagacaccaatgacgagagtgatgttatcagtgcactaagttacatttgccatatttctcagcagtaaacctagatgtggaatcaatgttactaccgttcattaaactgccaaccacaggaaacagcctggcaaagattcaaactgtaggccaaaaccagcaaaaagtgaatagagtcctcatgggcccaaggagcatccagaaaaggcacttcaaagaggtgggaaggcagagcatcaggagggaacagggtgcccaggcatctgtggagaacgctgccgaagaaaaaaggctcgggagtccagccccaagggagctggaacagcctcacacacagcaggggcctgagaagttagcgggaaacgccatctacaccaagccttcgttcacccaagagcataaggcagcagtctctgtgctgacacccttctccaagggcgcgccttctacctccagccctgcaaaagccctaccacaggtgagagacagatggaaagacaacacacacactatttccattttagaaagtgcaaaggctagagttacaaatatgaaggcttctaaaccaatttcacattccagaaaaaaataccgctttcacaaaactcgctcccgcatgacccacagaacacccaaggtcaaaaagagtccaaagttcagaaagaaaagttatctgagtagactgatgctcgcaaacaggcctccgttctctgcagcgaagagcctcataaattccccttcacaaggggctttttcatccttaggagacctgagtcctcaagaaaacccttttctggaagtatctgctccttcagaacattttatagaaaccactaatataaaagacacaactgcaagaaatgccttggaagaaaatgtttttatggaaaacactaacatgccagaagtcaccatctctgaaaacacaaactacaatcatcctcctgaggcagattccgctgggactgcattcaacttagggccaactgttaaacaaactgagacaaaatgggaatacaacaacgtgggcactgacctgtcccccgagcccaaaagcttcaattacccattgctcagtttgaaattcagctaa

SEQ ID NO: 192 - DNA, 1312 bp, Homo sapiens
  CDS (522)..(1229)
ggaaagagaccctatgtgatgtgtttggaccaggtggattaaaagcggggggggtatacccgggcattggtcggaaattcccttcaacagtcctttcctttaggggggcatcggttaatttttccctgtagcccacgttcaggtcagctccgcaggggctctcgtgactattttcttcctttattcatcagtgaggtatgttcagggcctaattaattgtggatatgaggcagggtcaagaggacaaaggaacagggcctttactttctacatagctcccctgtttcatccaaggaggttaagtattgatttttatcggttttctcaactgtgaatataataaactgaaagcatttcagggagaagctggagaacaccttctctagctgcactccaccttaaggctgaagctggatttgtttactgtttctcctgggggcaggggcagttgagaaataaccaagtagtctgccaagccagggtcaaccctccaggccacaggttgagcaaatgctacagccatggacagggagacactcctcacgaaggggtggtcctcatcctttcagatcaacttcctgctggaggctccaccctcaccacgtccctccctcttctctcatctggagtcaccttttgggattttggagttgagcaccatggggactccaaatgatcaggcagtgctgcaggccatcttcaaccctgacaccccatttggagacattgttggattggacctcggagaggaagcagaaaaggaagaacgagaagaagatgaagttttccctcaagcacagctggaacagtccaaggccctggagctgcagggggtgatggcagcagaggctggggacctcagcacagccctggagaggtttggccaagccatctgcctgctgcctgagagggcttcagcctacaacaaccgtgcccaggcccggcgactccagggagacgtggcaggcgccctggaggatctggaacgcgcggtggagctgagcggcggccggggccgcgccgcccgccagagctttgtgcagcgcggactcctggcgcggctgcagggccgagacgacgacgcccgcagggacttcgagagggcggcacggctgggcagccccttcgcgcggcgccagctggtgctgctcaacccctacgccgcgctgtgcaaccgcatgctggccgacatgatggggcagctgcgccgcccccgtgacagccgctgagcgccgcggacccgggcgtccgcgggcgaggggacgggactgggccctgaaccaataaagccgtcgggcctcaaaaaaaaaaa

SEQ ID NO: 193 - DNA, 1694 bp, Homo sapiens
  CDS (259)..(1332)
tgtacgatctcttggattctctagagcggccgccgagagaccccggaggcgccgcagagacgggatcttgctgtattgcccaggccggtcttgaactcctgagttcaagcagtccaccttggcctcccaaaatgctgggattacaagcatgagccaccatgcctggtctgattttggaaaaattaaagaatatggagatagcttggtgaaagagacccagatggtttgggatttctgtttttatataagaattcacagatggattcagtggaaaagacaacaaatagaagtgaacaaaaatccagaaagtttttaaaaagcctcatccggaaacagccccaggaactgctcctggttatcgggactggcgtcagcgcagcagtggcccccggaatccctgccctttgctcgtggagaagctgcatcgaggccgtcatcgaggctgcagagcagctggaggtgctgcaccccggagacgtcgccgagttccggaggaaagtgacaaaggaccgggacctgttggttgtcgcccatgatctgatccggaagatgtcacctcgcacaggcgatgccaagcccagcttcttccaggactgcctgatggaggtgtttgacgacctggagcagcacatccggagtcctctggtgctgcagtcgatcctcagcctgatggacagaggcgccatggtcctgaccaccaactatgacaacctgctggaggcctttggccggcggcagaacaagcccatggagtccctggacttgaaggacaagaccaaggtccttgaatgggcaagagggcacatgaagtacggcgtcctccacattcacggcctctacacggacccctgcggggtggtgctggacccatcggggtataaagacgtcactcaagacgcagaagtcatggaagtcctccagaacttataccgcaccaagtcctttctgtttgtgggctgtggggagacccttcgtgatcagatattccaggccctctttctttactccgtgccgaataaggtggatttggagcactacatgcttgtgctgaaggagaatgaagaccatttctttaagcatcaggcagatatgcttctgcacggaatcaaagttgtatcctacggggactgttttgaccactttccaggatatgtgcaagaccttgccactcagatctgcaaacagcaaagcccagatgctgatcgcgtggacagcaccacattattgggtaatgcatgccaggactgtgcaaagaggaagttagaagagaatggaattgaagtttcaaaaaaacgcacacaatcagatactgatgatgctggagggtcttgaaatctttacagtaaaacctgcaacttgaaaactagccttctgtaaccacagtgcccaaacgaagaggaatgtatggagaactccacgtggatctctgattgcgaaaccgtcacatacaccaagagagccacatgggcatgtggccctcaaggctgggtgagagggctcccctgtgtgttgaactatgcaggagggtgacgcggacacatttcaggtggactttgcaaggactgatggatagctacctcagggaccagaatccgtgggaagggatggacctggtgttcccgttcccatctgacaggttctcttttgtcaaggtggtatttttcgtaataaaaggggaagagtaaaaaaaaaaa

SEQ ID NO: 194 - DNA, 419 bp, Homo sapiens
  CDS (184)..(399)
agacagaggctgatccctatggcaggcaaccacaaaattaagccacttacagtgttggaatccctgggcaaagatttgctcactgatgtttaggataactaggaggaacaaaatgtactgaactggaaggaagaggaaaaaaagaaatattacgatgctaaaactgaagacaaagctcgggtcatggcagactctatgcaagagaaactacgtatggcaggacaaatgcttcttcaaaccttttttaacatagaccacatatcccccaataaaaaagctcatccgaatatggaggctgtaccacctgagtcaggagaatctacagatgccctcaagctttgttctcatgaagaattcctgagactatgtaagaaagagctgaagagatctatccaataaaggagagaaacaaccgcaca

SEQ ID NO: 195 - DNA, 727 bp, Homo sapiens
  CDS (44)..(382)
  misc_feature (1)...(727): n = a,t,c or g
gctcggantcctgtccangtggtgttagacgcccgtccgggacatggctgaggcccacaaagaggccatgagccgcaaactgggtcagagtgagagccagggccctccacgggccttcgccaaagtgaacagcatcagccccggctccccagccagcatcgcgggtctgcaagtggatgatgagattgtggagttcggctctgtgaacacccagaacttccagtcactgcataacattggcagtgtggtgcagcacagtgaggggaagcccctgaatgtgacagtgatccgcaggggggaaaaacaccagcttagacttgttccaacacgctgggcaggaaaaggactgctgggctgcaacattattcctctgcaaagatgattgtccctggggaacagtaacaggaaagcatcttcccttgccctggacttgggtctagggatttccaacttgtcttctctccctgaagcataaggatctggaagaggcttgtaacctgaacttctgtgtggtggcagtactgtggcccaccagtgtaatctccctggattaaggcattcttaaaaacttaggcttggcctctttcacaaattaggccacggccctaaataggaattccctggattgtgggcaagtgggcggaagttattctggcaggtactggtgtgattattattattatttttaataaagagttttacagtgctgatatgaaaaaaaaaaaaa

SEQ ID NO: 196 - DNA, 1136 bp, Homo sapiens
  CDS (269)..(541)
attttctctggtgttttcactagttccggcctttggcgctctatgacgtcaccgaagtgacggagcggaaaagcgcgagaagcggcttggttccttgtacgcagaggcggtagtgacacaggcacaactgagagtggcagaagctcagctgacaaggactggggacggcggtgtccttgtcttgcctttgtcgcccccgcccctctcttccctggctggacttgcggagtccccgccgaagaacccgaggagccatatattgaagaccatgtctggaagcttctactttgtaattgttggtcaccatgataatccagtttttgaaatggagtttttgccagctgggaaggcagaatccaaagacgaccatcgtcatctgaaccagttcatagctcatgctgctctcgacctcgtagatgagaacatgtggctatcgaacaacatgtacttgaaaactgtggacaagttcaacgagtggtttgtgtcggcatttgtcactgcggggcatatccttaccttcttagtaaaggtaactaactaaagtttgggctcacaaaccagaagaacatggaacatagatgccaggctctgagtctgtagacttcacagtcaggtgaaaatgtaagtttccatttatggggctacttttctttttttaggggggaaaaacattttgtttaatagctaattttaaaactaagtctcatacacaaaaagagtttatctggaccctatcaagggtgattttactttattttacagttattttctaactttgaaagcttatgttctctttatgataaaactaagctaattttaaacccagtttatatattcaacttttccatcacaaatacactgcatgtgactaatttgaagaatactgtatcaacgaactggttgctttttgtttttcatttctaagaaagattatgccttaattatttcacatatgaggtttattatgcttcatgacataagacaagaagatggaataaagaacttctttactgatgtttatgatttatatataaaggtatggtatgttctataatttttaaattctgatgagaaaggattcgacctttgtcaggaaactggcctattgaagtaactcccttaggctgcagtttacc

SEQ ID NO: 197 - DNA, 3504 bp, Homo sapiens
  CDS (11)..(2899)
ggcacgaggcatggccaccgcggcaacctcacccgcgctgaagcggctggatctgcgcgaccctgcggctcttttcgagacgcatggagcggaggagatccgcgggctggagcgccaggttcgggccgagatcgagcacaagaaggaggagctgcggcagatggtgggcgaacggtaccgcgacctgatcgaggcggccgacaccatcggccagatgcgccgctgcgccgtggggctagtggacgccgtgaaggccaccgaccagtactgcgcccgcctccgccaggccggctcggccgcgccccggccaccgcgggcccagcagccacagcagccatcccaagagaagttctacagcatggctgcccagatcaagctactcttagaaattccggagaagatctggagctcgatggaagcctctcagtgtctccacgccacacagctctacctgctctgctgccacctccacagcctgctccagctggattcttctagttcccgatacagtcccgtcctctcccggtttcctatactcatccggcaggtggcggccgcaagccacttccggtcaactattctgcatgaaagcaagatgttgctcaaatgccaaggtgtgtctgaccaagctgtggccgaggccctgtgctctataatgctcttagaagagagttctcctcgccaagccctcacagacttcctgctggccagaaaggcaactattcagaaacttctcaaccagccacaccatggtgctggtatcaaggctcagatttgctcattagttgagttgctggccaccactctgaagcaagctcatgcccttttctacactttgccagaaggactgctgccagatccagccctgccatgtggcttgctcttctctactctggagaccatcacaggccagcatcctgccggaaagggcactggtgtcctgcaggaagagatgaaactctgcagctggtttaaacacctgccagcatccatcgtcgagttccagccaacactccgaacccttgcacatcccatcagtcaggaatacctgaaagacacgctgcagaaatggatccacatgtgtaatgaagacattaaaaatgggatcaccaacctgctcatgtacgtgaagagcatgaagggtctcgcgggaatccgggacgccatgtgggagttacttaccagtgagtccaccaatcacagctgggatgtgctatgtcggcggcttctggagaagccgctcttgttctgggaagatatgatgcagcaactgttccttgaccgattacagactctgacaaaagaaggctttgactccatctccagtagctccaaggagctcttggtttcagctttgcaggaacttgaaagcagcaccagcaactccccttcaaataagcacatccactttgagtacaacatgtcgctcttcctctggtctgagagtcctaatgacctgccttccgatgcggcctgggtcagcgtggcaaaccggggtcagtttgccagtagcggcctctccatgaaagcacaagccatcagcccttgtgtacagaacttctgttctgccctggattctaagctgaaggttaaactagatgacctcctggcttacctcccctctgatgactcatcactgcccaaggacgtttctcccacacaggccaagagttctgcctttgacagatacgcagatgcggggaccgtgcaggagatgctgcggactcagtccgtggcatgcatcaagcacatcgtggactgcatccgggcagagctacagagcattgaagagggtgtgcaagggcaacaggatgccctcaacagtgccaagctgcactcagttcttttcatggccagactctgccagtccctgggagagctgtgcccccatctgaagcagtgcatcctgggaaaatcagagagctcagagaaaccagcaagggagtttagggctctgagaaaacagggaaaggtgaaaactcaggaaatcattcctacacaggccaagtggcaagaggttaaagaagtactcctccagcagagcgtgatgggctaccaggtctggagcagtgcagttgtgaaagttttgattcatggattcacccagtcattacttctagatgatgctggctcagttctggccacagccaccagctgggatgagctagaaattcaggaggaggcagagtctggcagcagtgtcacatccaagatccgactccctgcacagccgtcctggtatgtacagtccttcctgtttagtttatgccaggaaattaatcgggttggaggccatgccttgccaaaggtgacattacaggagatgctgaaaagctgtatggttcaagtagtagctgcctatgagaaactctccgaagaaaaacagattaagaaagaaggtgcatttccagtcacccagaaccgggcgctgcagctgctttatgatctgcgttacctcaacattgttctgacagccaagggtgacgaggtgaagagtggccggagcaagccagactccagaattgagaaagtgactgaccacctggaagccctcattgatccatttgacctggacgttttcacgccacacctcaacagcaaccttcatcgcctggtgcagcgaacttctgttctgtttggattggtgactggtacagagaatcagctcgccccccggagcagtacgttcaactcccaagaaccccataacatcctgccactggcatccagtcagatcaggtttggacttctcccactgagcatgacaagcactcgaaaggctaaatcaaccagaaacatcgaaacaaaagctcaggttggtgccaagagcaagaggctcatccgtggatgggtccccacctcccaccgagccacccatgatcagctcccttttaaataactgattaagaactgaatgacaaaatgcactaatgctgcttttaatggcggcgcaatagagaagtacaaggttttactagcttgagctactagaaggtgtaaaagatgcccgctgacactaccaagtagcctcttaatagaaatgtagaaaatatacaggacagggtggagatgagctcttgaatttagtagggtgaaagagttaactgccaacccggcactatcattgtacttgtttggagaaaatctgttttgttctggtgatgatggttttatcttcccttttagttgggtgggaagtaacagaaaatttgtttccccaaaagtttgacattttcttgttaatacacgtttcatttcagtacgatgccaactgttaagcctgcaggaatcctcctgggtatttctgaattgtgctgtgtgcatgtgtgtttgaaagctcaaacagcttgtcttcttacagcatcgagttgtttgctttattgttagacacaatattagcagtgtatcctttccgtattccctaccatcgaacccattaagatctaaaatccttgtcaagtatctggctttaaaagttgggagatggtagtttaaaaaaaaaaa

SEQ ID NO: 198 - DNA, 3624 bp, Homo sapiens
  CDS (11)..(3019)
ggcacgaggcatggccaccgcggcaacctcacccgcgctgaagcggctggatctgcgcgaccctgcggctcttttcgagacgcatggagcggaggagatccgcgggctggagcgccaggttcgggccgagatcgagcacaagaaggaggagctgcggcagatggtgggcgaacggtaccgcgacctgatcgaggcggccgacaccatcggccagatgcgccgctgcgccgtggggctagtggacgccgtgaaggccaccgaccagtactgcgcccgcctccgccaggccggctcggccgcgccccggccaccgcgggcccagcagccacagcagccatcccaagagaagttctacagcatggctgcccagatcaagctactcttagaaattccggagaagatctggagctcgatggaagcctctcagtgtctccacgccacacagctctacctgctctgctgccacctccacagcctgctccagctggattcttctagttcccgatacagtcccgtcctctcccggtttcctatactcatccggcaggtggcggccgcaagccacttccggtcaactattctgcatgaaagcaagatgttgctcaaatgccaaggtgtgtctgaccaagctgtggccgaggccctgtgctctataatgctcttagaagagagttctcctcgccaagccctcacagacttcctgctggccagaaaggcaactattcagaaacttctcaaccagccacaccatggtgctggtatcaaggctcagatttgctcattagttgagttgctggccaccactctgaagcaagctcatgcccttttctacactttgccagaaggactgctgccagatccagccctgccatgtggcttgctcttctctactctggagaccatcacaggccagcatcctgccgctgtgggaatggatgacatcatcagtaaggagatgacagaggactctgccttatggaactccagaaatccaaggtcaaatggaggtgtcagcaaaattgacaaaggagatacagccaaaggaaagggcactggtgtcctgcaggaagagatgaaactctgcagctggtttaaacacctgccagcatccatcgtcgagttccagccaacactccgaacccttgcacatcccatcagtcaggaatacctgaaagacacgctgcagaaatggatccacatgtgtaatgaagacattaaaaatgggatcaccaacctgctcatgtacgtgaagagcatgaagggtctcgcgggaatccgggacgccatgtgggagttacttaccagtgagtccaccaatcacagctgggatgtgctatgtcggcggcttctggagaagccgctcttgttctgggaagatatgatgcagcaactgttccttgaccgattacagactctgacaaaagaaggctttgactccatctccagtagctccaaggagctcttggtttcagctttgcaggaacttgaaagcagcaccagcaactccccttcaaataagcacatccactttgagtacaacatgtcgctcttcctctggtctgagagtcctaatgacctgccttccgatgcggcctgggtcagcgtggcaaaccggggtcagtttgccagtagcggcctctccatgaaagcacaagccatcagcccttgtgtacagaacttctgttctgccctggattctaagctgaaggttaaactagatgacctcctggcttacctcccctctgatgactcatcactgcccaaggacgtttctcccacacaggccaagagttctgcctttgacagatacgcagatgcggggaccgtgcaggagatgctgcggactcagtccgtggcatgcatcaagcacatcgtggactgcatccgggcagagctacagagcattgaagagggtgtgcaagggcaacaggatgccctcaacagtgccaagctgcactcagttcttttcatggccagactctgccagtccctgggagagctgtgcccccatctgaagcagtgcatcctgggaaaatcagagagctcagagaaaccagcaagggagtttagggctctgagaaaacagggaaaggtgaaaactcaggaaatcattcctacacaggccaagtggcaagaggttaaagaagtactcctccagcagagcgtgatgggctaccaggtctggagcagtgcagttgtgaaagttttgattcatggattcacccagtcattacttctagatgatgctggctcagttctggccacagccaccagctgggatgagctagaaattcaggaggaggcagagtctggcagcagtgtcacatccaagatccgactccctgcacagccgtcctggtatgtacagtccttcctgtttagtttatgccaggaaattaatcgggttggaggccatgccttgccaaaggtgacattacaggagatgctgaaaagctgtatggttcaagtagtagctgcctatgagaaactctccgaagaaaaacagattaagaaagaaggtgcatttccagtcacccagaaccgggcgctgcagctgctttatgatctgcgttacctcaacattgttctgacagccaagggtgacgaggtgaagagtggccggagcaagccagactccagaattgagaaagtgactgaccacctggaagccctcattgatccatttgacctggacgttttcacgccacacctcaacagcaaccttcatcgcctggtgcagcgaacttctgttctgtttggattggtgactggtacagagaatcagctcgccccccggagcagtacgttcaactcccaagaaccccataacatcctgccactggcatccagtcagatcaggtttggacttctcccactgagcatgacaagcactcgaaaggctaaatcaaccagaaacatcgaaacaaaagctcaggttggtgccaagagcaagaggctcatccgtggatgggtccccacctcccaccgagccacccatgatcagctcccttttaaataactgattaagaactgaatgacaaaatgcactaatgctgcttttaatggcggcgcaatagagaagtacaaggttttactagcttgagctactagaaggtgtaaaagatgcccgctgacactaccaagtagcctcttaatagaaatgtagaaaatatacaggacagggtggagatgagctcttgaatttagtagggtgaaagagttaactgccaacccggcactatcattgtacttgtttggagaaaatctgttttgttctggtgatgatggttttatcttcccttttagttgggtgggaagtaacagaaaatttgtttccccaaaagtttgacattttcttgttaatacacgtttcatttcagtacgatgccaactgttaagcctgcaggaatcctcctgggtatttctgaattgtgctgtgtgcatgtgtgtttgaaagctcaaacagcttgtcttcttacagcatcgagttgtttgctttattgttagacacaatattagcagtgtatcctttccgtattccctaccatcgaacccattaagatctaaaatccttgtcaagtatctggctttaaaagttgggagatggtagtttaaaaaaaaaaa

SEQ ID NO: 199 - DNA, 1080 bp, Homo sapiens
  CDS (19)..(789)
aaccctgaaaggctcgcgatgcctctacacaagtatcccgtgtggctctggaagcggctgcagctgcgggagggcatctgttcccgcctgcccggccactacctgcgctccctggaggaggagcggacgcccactcccgtgcactataggcctcatggggccaagttcaagatcaaccccaagaacgggcagcgggagcgtgtggaggacgtgcccattcccatctactttccccccgaatcccagcgggggttgtggggcggcgagggctggatcctgggccaaatatatgccaacaacgacaagctctccaagaggctgaagaaagtgtggaagccacagctgtttgagcgagagttctacagtgagatcctggacaagaagttcacagtgactgtgaccatgcggaccctggacctcatcgatgaggcttacgggctcgacttttacatcctcaagaccccgaaggaggacctgtgctccaagtttgggatggacctgaagcgagggatgcagctgcggcttgcccggcaggacccccagctgcaccccgaggaccccgagcggcgggcagccatctacgacaagtacaaggaatttgccatcccagaggaggaggcagagtgggtgggcctcacgctggaggaggccattgagaagcagagacttttggaggagaaggaccctgtacccctgttcaagatctatgtggcggagctgatccagcagctgcagcagcaggcactgtcagagccggcggtggtgcagaagagagccagtggccagtgaccacacagctcctccatgcctgaccaacaggcccagctttccctgccaggccctttgcactgaggacacagatcccggggagctgtgagggccaccggtgggcagtgggtggatcctggtttcgtgtgctgcccatgcaccttccagcccggggccagcttggcagggatccccaggaggcctgggccgcccagaggctcctctcaggctgggccccgacgtttgcggcagtgttccttgtgcccgtggggccgggagcgagtaaagtctgggccaggcaaaaaaaaaaaa

SEQ ID NO: 200 - DNA, 4387 bp, Homo sapiens
  CDS (851)..(4387)
atgcagcgccggaattcccgggtcgacgatttcgtccggttcctgaaagttgcaagaatgggggcggaaggtgttatgtctcctaagtcttacaggcgtgggaggacggggaagtaggatgtggttttcaccgatacttagacctcctagacacatccccaacccctgccctgggtgtggagtgggtggctgagtctgaggccgggagggtctctcactctagggtggatgggatgagggccctagcgtgggaacctcacctgccctgctgaaggcctgggtgctaaggtgctgtaaagacaggggcaggcctgtgcccaccttctgtctccccacaggctctgttcacttgcagataccatacagagccttcattcattcattcattgacaatgaatgtggggtgcccctctgtaaccagacctggatcaagacgcctgcctccccagactcagccactgcccacttcagcttctgccggaccctcctggagcacacggtgtcagctgagagcatcccctgccacttgcctcggacacctggcaccagcctcacgtggcatgactcccgcagccagagggcggccagcagcaggccaatcaagctcctgcagcagcccggcacagacaccccccagggccggctgtactctgaccactatggcctgtaccatacaagcccctcgctgggtggcctgacccggcccgtggtcctgtggagtcagcaggacgtctgcaagtggctcaagaagcactgtccccacaactacctcgtctacgtggaggccttctcccagcatgccatcaccggccgggcactgctgcggctgaatgcggagaagctgcagcggatggggctggcccaggaggcccagaggcaggaggtgctgcagcaggtgctccgcctgcaggtgcgtgaggaggggcggagcctgcagctgctcagccaagaaacacatgggacacggcacatccccggtgcacacaaacacactgtattccacgacaccctggcatgtagatgctcacagaaaacagccgtccctcaccagcaccctgacactgagacatgccgcagcctggacacatggatactgaaatccagacacatcgtccccagtcctgtgctgtcagtgccccgccacctccagaccactcagcccacaccggaccccagtgccccctgcctgcagaagcccaagctgtggggcagagaaggccctggcactggttcagaaccactgcccccagagctgggaaagggtgacccaatggagtgcatcaccttcggcatcatcttcgcagctgtggggctacgcacactgtggagctgcgtacactgtagagctgcgtgttgggaagggggtctggaagttgagatgacggatcctttctgcgttggaggccgtcggctcccggggtccagcaagagtggtcccgggaaggatggcagccgaaaggaggtccgacttccaatgctgcatgacccaccgaagatggggatgccggtggtccgtggtggacagacagtgcccggccaggcccctctctgctttgacccgggaagtccagccagtgacaagacagaagggaagaaaaaggggcggccaaaagccgagaaccaggccctccgagacattcctctctccctgatgaacgactggaaggatgagttcaaggcacactcgagggtgaagtgtccaaactcagggtgctggctggagttccccagcatctacgggctcaagtaccattaccagcggtgccaagggggtgccatctcagatcgcctggccttcccctgccccttctgcgaggccgcattcacctctaagacccagctggagaaacaccggatctggaaccacatggaccgacccctgcctgcctccaagcctgggcccatcagcaggccggtcaccatcagccggcctgttggggtcagcaagcccatcggagtgagcaaacctgtcactattggcaaacctgtgggtgtcagcaaacccattggcatcagcaagccagtctcggtcggcagacccatgccagtcaccaaggccatcccggtcactaggcccgtgccagtcaccaaacctgtcacagtcagcaggcccatgcccgtcaccaaggccatgccggtcaccaaacccatcacagtcaccaagtctgtgccggtcaccaaacccgtacctgtcaccaaacccattacggtaacaaagcttgtgacagttacgaaacccgtgccggtcaccaagccagtgacagtcagcaggcccattgtggtcagcaagccggtgacagtcagcaggcccattgctatcagcagacacacaccgccctgcaaaatggtgctgctgaccaggtcggagaacaaagcacctcgtgccacagggaggaacagtggtaagaaaagggctgcggacagcctggacacctgcccaattccacccaagcaggccaggccagagaatggggagtacggcccctcctccatgggccagagctcggccttccagctgagtgcagacaccagcagtggctccttgtcgccaggcagcaggccgtcagggggcatggaggcactgaaggctgcaggccctgcgtccccgcctgaggaggacccggagcgcacaaagcacagcctggtcaaagctgaggacaaggcccgagttcaccgctccaagaagcaggaggggccaggccctgaggacgcccggaagaaggtgccagctgcccccatcactgtcagcaaggaggcaccggcccctgtggcccacccagctccaggtggccctgaagagcagtggcagagggccatccatgagcgcggggaagccgtctgccccacctgcaacgtggtcacccggaagactctcgtggggcttaagaagcacatggaggtgtgtcagaagcttcaggatgcactcaagtgccagcactgccggaagcagttcaagtccaaagccggcctcaactaccacactatggccgagcacagtgccaagccctctgacgccgaggcctccgaagggggcgagcaggaggagcgcgagaggctgcgcaaggtgctgaagcagatgggacggctgcgctgcccccaggagggttgcggggctgccttctccagcctcatgggctaccagtaccaccagcggcgctgcgggaagccgccctgcgaggtggacagcccctccttcccctgcacccactgtggcaagacgtaccgatccaaggctggccacgactaccacgtgcgctcggagcacacggcccccccccctgaggagcccacagacaagtcccctgaggctgaggacccgctgggtgtggagcggaccccaagcgggcgtgtccgccgcacgtcggcccaggtggcggtgttccacctgcaggagatagcggaggacgagctggcccgcgactggaccaagcggcgcatgaaggatgaccttgtgcccgagaccgcacggctcaactacactcgaccagggctccccacgctgaacccccagctgctagaggcatggaagaatgaagtgaaggagaaaggccacgtcaactgtcccaacgacgtgagcggaggcagccggtgctgtgaagccatctactccagcgtgtccggactcaaggctcatctcgccagctgcagtaagggggcccacctggcagggaagtaccgctgtctgctgtgtccgaaggagttcagttctgagagtggcgtcaaataccacatcctgaagacccacgcagagcccccagcagccctgctgcaggtgcttgcctggtcccgaaggctgtgtccagccctgctgcaggtgcttgcctggtcccgaaggctgtgtccagccccctgcaggtgcttgcctggtcccgaaggctgtgtccagccccctgctgcaggtgcttgcctggtcctgaaggctgtgtccagccccctgctgcaggctgtgtccagccctgcggcaggtgcctgcctggtcctgaaggctgtgtccagccctgcggcaggtgcctgcctggtcctgaaggctgtgtccagccctgcggcaggtgcctgcctggtcctgaaggctgtgtccagccctgcggcaggtgcctgcctggtcctgaaggctgtgtccagccccctgctgcagaactggttccgaacatcagcagacccacctcccaaacacaggagccaggactcattggtgcccaagaaggaaaagaagaaaaatctggcaggtggaaagaagcggggccgaaagcccaaggagcggaccccagaggagcctgtggccaagctgcccccgcgccgggacgactggcctccaggatgcagagacaagggggcccggggctccaccggccggaaggtgggagtcagcaaggcgcctgaaaagtga

SEQ ID NO: 201 - DNA, 4369 bp, Homo sapiens
  CDS (851)..(4369)
atgcagcgccggaattcccgggtcgacgatttcgtccggttcctgaaagttgcaagaatgggggcggaaggtgttatgtctcctaagtcttacaggcgtgggaggacggggaagtaggatgtggttttcaccgatacttagacctcctagacacatccccaacccctgccctgggtgtggagtgggtggctgagtctgaggccgggagggtctctcactctagggtggatgggatgagggccctagcgtgggaacctcacctgccctgctgaaggcctgggtgctaaggtgctgtaaagacaggggcaggcctgtgcccaccttctgtctccccacaggctctgttcacttgcagataccatacagagccttcattcattcattcattgacaatgaatgtggggtgcccctctgtaaccagacctggatcaagacgcctgcctccccagactcagccactgcccacttcagcttctgccggaccctcctggagcacacggtgtcagctgagagcatcccctgccacttgcctcggacacctggcaccagcctcacgtggcatgactcccgcagccagagggcggccagcagcaggccaatcaagctcctgcagcagcccggcacagacaccccccagggccggctgtactctgaccactatggcctgtaccatacaagcccctcgctgggtggcctgacccggcccgtggtcctgtggagtcagcaggacgtctgcaagtggctcaagaagcactgtccccacaactacctcgtctacgtggaggccttctcccagcatgccatcaccggccgggcactgctgcggctgaatgcggagaagctgcagcggatggggctggcccaggaggcccagaggcaggaggtgctgcagcaggtgctccgcctgcaggtgcgtgaggaggggcggagcctgcagctgctcagccaagaaacacatgggacacggcacatccccggtgcacacaaacacactgtattccacgacaccctggcatgtagatgctcacagaaaacagccgtccctcaccagcaccctgacactgagacatgccgcagcctggacacatggatactgaaatccagacacatcgtccccagtcctgtgctgtcagtgccccgccacctccagaccactcagcccacaccggaccccagtgccccctgcctgcagaagcccaagctgtggggcagagaaggccctggcactggttcagaaccactgcccccagagctgggaaagggtgacccaatggagtgcatcaccttcggcatcatcttcgcagctgtggggctacgcacactgtggagctgcgtacactgtagagctgcgtgttgggaagggggtctggaagttgagatgacggatcctttctgcgttggaggccgtcggctcccggggtccagcaagagtggtcccgggaaggatggcagccgaaaggaggtccgacttccaatgctgcatgacccaccgaagatggggatgccggtggtccgtggtggacagacagtgcccggccaggcccctctctgctttgacccgggaagtccagccagtgacaagacagaagggaagaaaaaggggcggccaaaagccgagaaccaggccctccgagacattcctctctccctgatgaacgactggaaggatgagttcaaggcacactcgagggtgaagtgtccaaactcagggtgctggctggagttccccagcatctacgggctcaagtaccattaccagcggtgccaagggggtgccatctcagatcgcctggccttcccctgccccttctgcgaggccgcattcacctctaagacccagctggagaaacaccggatctggaaccacatggaccgacccctgcctgcctccaagcctgggcccatcagcaggccggtcaccatcagccggcctgttggggtcagcaagcccatcggagtgagcaaacctgtcactattggcaaacctgtgggtgtcagcaaacccattggcatcagcaagccagtctcggtcggcagacccatgccagtcaccaaggccatcccggtcactaggcccgtgccagtcaccaaacctgtcacagtcagcaggcccatgcccgtcaccaaggccatgccggtcaccaaacccatcacagtcaccaagtctgtgccggtcaccaaacccgtacctgtcaccaaacccattacggtaacaaagcttgtgacagttacgaaacccgtgccggtcaccaagccagtgacagtcagcaggcccattgtggtcagcaagccggtgacagtcagcaggcccattgctatcagcagacacacaccgccctgcaaaatggtgctgctgaccaggtcggagaacaaagcacctcgtgccacagggaggaacagtggtaagaaaagggctgcggacagcctggacacctgcccaattccacccaagcaggccaggccagagaatggggagtacggcccctcctccatgggccagagctcggccttccagctgagtgcagacaccagcagtggctccttgtcgccaggcagcaggccgtcagggggcatggaggcactgaaggctgcaggccctgcgtccccgcctgaggaggacccggagcgcacaaagcacagcctggtcaaagctgaggacaaggcccgagttcaccgctccaagaagcaggaggggccaggccctgaggacgcccggaagaaggtgccagctgcccccatcactgtcagcaaggaggcaccggcccctgtggcccacccagctccaggtggccctgaagagcagtggcagagggccatccatgagcgcggggaagccgtctgccccacctgcaacgtggtcacccggaagactctcgtggggcttaagaagcacatggaggtgtgtcagaagcttcaggatgcactcaagtgccagcactgccggaagcagttcaagtccaaagccggcctcaactaccacactatggccgagcacagtgccaagccctctgacgccgaggcctccgaagggggcgagcaggaggagcgcgagaggctgcgcaaggtgctgaagcagatgggacggctgcgctgcccccaggagggttgcggggctgccttctccagcctcatgggctaccagtaccaccagcggcgctgcgggaagccgccctgcgaggtggacagcccctccttcccctgcacccactgtggcaagacgtaccgatccaaggctggccacgactaccacgtgcgctcggagcacacggcccccccccctgaggagcccacagacaagtcccctgaggctgaggacccgctgggtgtggagcggaccccaagcgggcgtgtccgccgcacgtcggcccaggtggcggtgttccacctgcaggagatagcggaggacgagctggcccgcgactggaccaagcggcgcatgaaggatgaccttgtgcccgagaccgcacggctcaactacactcgaccagggctccccacgctgaacccccagctgctagaggcatggaagaatgaagtgaaggagaaaggccacgtcaactgtcccaacgactgctgtgaagccatctactccagcgtgtccggactcaaggctcatctcgccagctgcagtaagggggcccacctggcagggaagtaccgctgtctgctgtgtccgaaggagttcagttctgagagtggcgtcaaataccacatcctgaagacccacgcagagcccccagcagccctgctgcaggtgcttgcctggtcccgaaggctgtgtccagccctgctgcaggtgcttgcctggtcccgaaggctgtgtccagccccctgcaggtgcttgcctggtcccgaaggctgtgtccagccccctgctgcaggtgcttgcctggtcctgaaggctgtgtccagccccctgctgcaggctgtgtccagccctgcggcaggtgcctgcctggtcctgaaggctgtgtccagccctgcggcaggtgcctgcctggtcctgaaggctgtgtccagccctgcggcaggtgcctgcctggtcctgaaggctgtgtccagccctgcggcaggtgcctgcctggtcctgaaggctgtgtccagccccctgctgcagaactggttccgaacatcagcagacccacctcccaaacacaggagccaggactcattggtgcccaagaaggaaaagaagaaaaatctggcaggtggaaagaagcggggccgaaagcccaaggagcggaccccagaggagcctgtggccaagctgcccccgcgccgggacgactggcctccaggatgcagagacaagggggcccggggctccaccggccggaaggtgggagtcagcaaggcgcctgaaaagtga

SEQ ID NO: 202 - DNA, 3205 bp, Homo sapiens
  CDS (592)..(3045)
ggtggagggtccggggaggagcaactctatgctgactttccagaactcgacctctcccagctggatgccagcgactttgactcggccacctgctttggggagctgcagtggtgcccagagaactcagagactgaacccaaccagtacagccccgatgactccgagctcttccagcctacctttaagtatcagctgctcagagaaggcatctgggaccaccctcaagagcctattgacagtgagaatgaggccctcctggcagagctcaccaagaccctggatgacatccctgaagatgacgtgggtctggctgccttcccagccctggatggtggagacgctctatcatgcacctcagcttcgcctgccccctcatctgcaccccccagccctgccccggagaagccctcggccccagcccctgaggtggacgagctctcactgctgcagaagctcctcctggccacatcctacccaacatcaagctctgacacccagaaggaagggaccgcctggcgccaggcaggcctcagatctaaaagtcaacggccttgtgttaaggcggacagcacccaagacaagaaggctcccatgatgcagtctcagagccgaagttgtacagaactacataagcacctcacctcggcacagtgctgcctgcaggatcggggtctgcagccaccatgcctccagagtccccggctccctgccaaggaggacaaggagccgggtgaggactgcccgagcccccagccagctccagcctctccccgggactccctagctctgggcagggcagaccccggtgccccggtttcccaggaagacatgcaggcgatggtgcaactcatacgctacatgcacacctactgcctcccccagaggaagctgcccccacagacccctgagccactccccaaggcctgcagcaacccctcccagcaggtcagatcccggccctggtcccggcaccactccaaagcctcctgggctgagttctccattctgagggaacttctggctcaagacgtgctctgtgatgtcagcaaaccctaccgtctggccacgcctgtttatgcctccctcacacctcggtcaaggcccaggccccccaaagacagtcaggcctcccctggtcgcccgtcctcggtggaggaggtaaggatcgcagcttcacccaagagcaccgggcccagaccaagcctgcgcccactgcggctggaggtgaaaagggaggtccgccggcctgccagactgcagcagcaggaggaggaagacgaggaagaagaggaggaggaagaggaagaagaaaaagaggaggaggaggagtggggcaggaaaaggccaggccgaggcctgccatggacgaagctggggaggaagctggagagctctgtgtgccccgtgcggcgttctcggagactgaaccctgagctgggcccctggctgacatttgcagatgagccgctggtcccctcggagccccaaggtgctctgccctcactgtgcctggctcccaaggcctacgacgtagagcgggagctgggcagccccacggacgaggacagtggccaagaccagcagctcctacggggaccccagatccctgccctggagagcccctgtgagagtggcgacccaacttttggcaagaagagctttgagcagaccttgacagtggagctctgtggcacagcaggtgagccagggggcttccactggcaggtgccttcaggaaaacacccgtgcatctctgagtttttcatcatgcatgggcaaggactcaccccacccaccacaccaccgtacaagcccacagaggaggatcccttcaaaccagacatcaagcatagtctaggcaaagaaatagctctcagcctcccctcccctgagggcctctcactcaaggccaccccaggggctgcccacaagctgccaaagaagcacccagagcgaagtgagctcctgtcccacctgcgacatgccacagcccagccagcctcccaggctggccagaagcgtcccttctcctgttcctttggagaccatgactactgccaggtgctccgaccagaaggcgtcctgcaaaggaaggtgctgaggtcctgggagccgtctggggttcaccttgaggactggccccagcagggtgccccttgggctgaggcacaggcccctggcagggaggaagacagaagctgtgatgctggcgccccacccaaggacagcacgctgctgagagaccatgagatccgtgccagcctcaccaaacactttgggctgctggagaccgccctggaggaggaagacctggcctcctgcaagagccctgagtatgacactgtctttgaagacagcagcagcagcagcggcgagagcagcttcctcccagaggaggaagaggaagaaggggaggaggaggaggaggacgatgaagaagaggactcaggggtcagccccacttgctctgaccactgcccctaccagagcccaccaagcaaggccaaccggcagctctgttcccgcagccgctcaagctctggctcttcaccctgccactcctggtcaccagccactcgaaggaacttcagatgtgagagcagagggccgtgttcagacagaacgccaagcatccggcacgccaggaagcggcgggaaaaggccattggggaaggccgcgtggtgtacattcaaaatctctccagcgacatgagctcccgagagctgaagaggcgctttgaagtgtttggtgagattgaggagtgcgaggtgctgacaagaaataggagaggcgagaagtacggcttcatcacctaccggtgttctgagcacgcggccctctctttgacaaagggcgctgccctgaggaagcgcaacgagccctccttccagctgagctacggagggctccggcacttctgctggcccagatacactgactacgattccaattcagaagaggcccttcctgcgtcagggaaaagcaagtatgaagccatggattttgacagcttactgaaagaggcccagcagagcctgcattgataacagccttaaccctcgaggaatacctcaatacctcagacaaggcccttccaatatgtttacgttttcaaagaaatcaagtatatgaggagagcgagcgagcgtgagagaacacccgtgagagagacttgaaactgctgtcctttaaaaaaaaaaaaaa

SEQ ID NO: 203 - DNA, 1192 bp, Homo sapiens
  CDS (90)..(527)
  misc_feature (1)...(1192): n = a,t,c or g
gcttggcacgaggcctcgcagccacgcccccctgagccccctcgtctgcttcttgtttggcagaaatagatgtggggcacagttcctagatgatgggaatctgcccaagctgtgtcctctggggaatgaaatcttgctcctcgtgcagcttcccctttcccttgcggggtgggggctgggggtgccaaggctccacccttggagggggttgctgggggtgccaaggctccaccctttgctcgctgggcagagggaaggaagcacctccctgtatgctctgcaggggcccctgcaggccactttgcctcagaggaaggaggagaggtcccctgggaaaatgcgcacacacacacacacacacgcacacacgcacatgcacacacgcacgcatgcacacacacacacacatatgtgcaggggtgcagcctaagtcaggggagccaggactgggtgcgcagctgggcctgccccattcttggagtccccagggaatgagcctcaggatccacttcgtcccttgtttctaagccaggctgcacggccgttcctgggtgtgaaagcattctgtcctgtctccagtcagagggaaccgcccccaaactagaaagctaatttcccccgaaggttcatgaagccagaggcatgcccttgggggttggtcgggagaagggtgagaggcagtgctgtggaaggggcctggcccctgctgcctgcgattctccccgggtatgtggccttctgcctccttcagcctcagtttcctcacctgtaacatgagaataatgatgcctgcctgcccaggccacctcctgggactgcagtggggactctaagtgtaaaactgtcatgaggatggtttatgaagtcccagggaccacacctgccactcagggaagagaccgctgacctcagccatcagccgtgtgcatcgtgaggggcagcgagctcaggacggagagctctcccttggttcggagtcagcacacctgcactcccacacgcccacccagctgtgtgtcctccgccgagggcgagcctctctgtgactcttctgtaaaaatgcaccccatttttgcccacttcctgccacgagacccatcctcttgcgatcccgccaggcatgtgtgtgtgaatgcatgtgcaaagttttccatcagaagggtggttntgggccctgcaagtcctaaccctt

SEQ ID NO: 204 - DNA, 2471 bp, Homo sapiens
  CDS (137)..(2005)
gtgccggccctgaattcccgggtcgacgatttcgtgccagcaggaagtgggagaagaggcgacccaaggcgggctggcgggctggcggcagtcgctacttgcctagtagcctcagccgctgtgggctcctggggagatggaggggccggggctgggctcgcagtgcaggaatcacagccatggcccccaccctccaggatttggtcgatatggcatctgtgcacatgaaaacaaagaacttgccaatgcaagagaagctcttcctcttatagaggactctagtaactgtgacattgtcaaagctactcaatacggaatttttgaacgatgtaaagagttggtagaagcaggatatgatgtcaggcaaccagataaagaaaatgtgtcgcttcttcattgggctgctattaacaacagactggatcttgtaaggttttatatttcaaaaggtgctgttgtagatcagttgggtggagatttaaattcaactcctcttcactgggccatccgacaaggacatttacctatggtcatattattactccagcatggtgcagaccccactcttattgatggagagggattcagcagcatccacctggcagtattgtttcaacacatgcctattatagcatatctcatctcaaagggacagagtgtgaatatgacagatgtaaatgggcagacacctctcatgttatcagctcacaaagtaattgggccagaaccaactggatttcttttaaagtttaatccttctctcaatgtggttgataaaatacaccaaaacactccacttcactgggcagttgcagcaggaaatgttaatgcagttgataagcttttggaagctggttctagcctggatatccagaatgttaagggagaaacacctcttgatatggctctacaaaacaaaaatcagctcattattcatatgctaaaaacagaagccaaaatgagagccaaccaaaagttcagactttggaggtggctgcagaaatgcgagctcttcctgctgctgatgctttctgtgattaccatgtgggctattggatacatattggacttcaattcagattcttggcttttaaaaggatgtcttctagtaacactgttttttctgacatctttgtttccaaggttcttggttgggtataagaaccttgtatacttaccaacagcctttctgctaagttctgttttttggatatttatgacttggttcatcttattttttcctgatttagcaggagcccctttctatttcagtttcattttcagcatagtagcctttctatactttttctataagacttgggcaactgatccaggcttcactaaggcttctgaagaagaaaagaaagtgaatatcatcacccttgcagaaactggctctctggacttcagaacattttgtacatcatgtcttataaggaagccattaaggtcactccactgccatgtatgcaactgctgtgtggctcgatatgatcaacactgcctgtggactggacggtgcataggttttggcaaccatcactattacatattcttcttgtttttcctttccatggtatgtggctggattatatatggatctttcatctatttgtccagtcattgtgccacaacattcaaagaagatggattatggacttacctcaatcagattgtggcctgttccccttgggttttatatatcttgatgctagcaactttccatttctcatggtcaacatttttattattaaatcaactctttcagattgcctttctgggcctgacctcccatgagagaatcagcctgcagaagcagagcaagcatatgaaacagacgttgtccctcaggaagacaccatacaatcttggattcatgcagaacctggcagatttctttcagtgtggctgctttggcttggtgaagccctgtgtggtagattggacatcacagtacaccatggtctttcacccagccagggagaaggttcttcgctcagtatgaagaaaagcaacccaaaactctcaatctgatttgtttttgtttatgtcgatgccctgtagtttgaaagtgaagtaaagatttagaattcacctaagtccaaaggaaaacacgtggtttttaaagccattaggtaaaaaaagttctcaataaaggcattacaattttttaggtttagaaagatggacttttctgataaatcttggcagacatctaaaaaaaaaaccatatttttcacaagaaaatgcaagttactttttttggaaataatactcactgattatggataaaatggaatattttcagatactatattggctgtttcaaaatagtactattctttaaacttgtaatttttgctaagttatttgtctttgttgtatctataaatatgtaaaaaatatttaaatagatgtacctgttttgctttcacacttaataaaaaatttttttttgtaaaaaaaaaaaa

SEQ ID NO: 205 - DNA, 1571 bp, Homo sapiens
  CDS (117)..(1091)
  misc_feature (1)...(1571): n = a,t,c or g
agtcgacgatttcgtcccgctccccgccgggacgccccgcgccgagccggaggccgcgtggacccgaaagccgctgggaaaagtttacccaatgtccagcctagcccctaggcaccatgtcggacagtgatctaggtgaggacgaaggcctcctctccctggcgggcaaaaggaagcgcagggggaacctgcccaaggagtcggtgaagatcctccgggactggctgtacttgcaccgctacaacgcctacccctcagagcaggagaagctgagcctttctggacagaccaacctgtcagtgctgcaaatatgtaactggttcatcaatgcccggcggcggcttctcccagacatgcttcggaaggatggcaaagaccctaatcagtttaccatttcccgccgcgggggtaaggcctcagatgtggccctcccccgtggcagcagcccctcagtgctggctgtgtctgtcccagcccccaccaatgtgctctccctgtctgtgtgctccatgccgcttcactcaggccagggggaaaagccagcagcccctttcccacgtggggagctggagtctcccaagcccctggtgacccctggtagcacacttactctgctgaccagggctgaggctggaagccccacaggtggactcttcaacacgccaccacccacacccccagagcaggacaaagaggacttcagcagcttccagctgctggtggaggtggcgctacagagggctgctgagatggagcttcagaagcagcaggacccatcactcccattactgcacactcccatccctttagtctctgaaaatccccagcctccgctcagtgatgagaccaagagatcggagacaagcatggtgctgctgcttctgctgcttctccagaaaatccctgggacacctttgttccagcctggtttcctgggctgggctcaggaaagctgccaaattcagtcctatgttgggtccaagctgcccctgtgctgtttctgtcaagccaggtgtggacattccaagttcatatgcgtgaacaaaagaaaagaggaacccagtggatgtaacagaaccgactccagttgaatgtttagatttttgctaaactgttttctttttcccttttttgctgtggtttgcattcacggcagtagttagcccaggtgtggggaacgagagtgcactgcatgatagcgttctggtgagctgggaaggacccaccactgccactgaggattgttttggaagaaaggaatatttttatcttggggaccagctaagtctctgcagtagtgtgaaattccaaatggttgttttatcattggtttggtttaccaaaaaaaaggcagggaaaaaaaaaaaaaacaaccgtatgagcgcattggcttgtctgccgccnccaagaaaggggtagaaagcccacagcaggggggcagtccagcagactctgactcaactttntaggcccctagcngagaaagataagttccaaaggtgttttggttttcctttaattttaatcggagtttttttgggtggggtgggggaagtaaactagnctgagcg

SEQ ID NO: 206 - DNA, 1596 bp, Homo sapiens
  CDS (19)..(936)
aggaaaaggcgctccgtcatggggatccagacgagccccgtcctgctggcctccctgggggtggggctggtcactctgctcggcctggctgtgggctcctacttggttcggaggtcccgccggcctcaggtcactctcctggaccccaatgaaaagtacctgctacgactgctagacaagacgactgtgagccacaacaccaagaggttccgctttgccctgcccaccgcccaccacactctggggctgcctgtgggcaaacatatctacctctccacccgaattgatggcagcctggtcatcaggccatacactcctgtcaccagtgatgaggatcaaggctatgtggatcttgtcatcaaggtctacctgaagggtgtgcaccccaaatttcctgagggagggaagatgtctcagtacctggatagcctgaaggttggggatgtggtggagtttcgggggccaagcgggttgctcacttacactggaaaagggcattttaacattcagcccaacaagaaatctccaccagaaccccgagtggcgaagaaactgggaatgattgccggcgggacaggaatcaccccaatgctacagctgatccgggccatcctgaaagtccctgaagatccaacccagtgctttctgctttttgccaaccagacagaaaaggatatcatcttgcgggaggacttagaggaactgcaggcccgctatcccaatcgctttaagctctggttcactctggatcatcccccaaaagattgggcctacagcaagggctttgtgactgccgacatgatccgggaacacctgcccgctccaggggatgatgtgctggtactgctttgtgggccacccccaatggtgcagctggcctgccatcccaacttggacaaactgggctactcacaaaagatgcgattcacctactgagcatcctccagcttccctggtgctgttcgctgcagttgttccccatcagtactcaagcactataagccttagattcctttcctcagagtttcaggttttttcagttacatctagagctgaaatctggatagtacctgcaggaacaatattcctgtagccatggaagagggccaaggctcagtcactccttggatggcctcctaaatctccccgtggcaacaggtccaggagaggcccatggagcagtctcttccatggagtaagaaggaagggagcatgtacgcttggtccaagattggctagttccttgatagcatcttactctcaccttctttgtgtctgtgatgaaaggaacagtctgtgcaatgggttttacttaaacttcactgttcaacctatgagcaaatctgtatgtgtgagtataagttgagcatagcatacttccagaggtggtcttatggagatggcaagaaaggaggaaatgatttcttcagatctcaaaggagtctgaaatatcatatttctgtgtgtgtctctctcagcccctgcccaggctagagggaaacagctactgataatcgaaaactgctgtttgtggcaggaacccctggctgtgcaaataaatggggctgaggcccctgtgtgatattgaaaaaaaaa

SEQ ID NO: 207 - DNA, 1583 bp, Homo sapiens
  CDS (304)..(903)
  misc_feature (1)...(1583): n = a,t,c or g
ggcctgaagtacccaagtccccgagggcgcgccttccccgggaatttaattcaggacaataatgttttattgagcgcctattgtgaatcagacactgagcagtaagcgtcggagaaacaggtgaatgataccggggaaaagtcattccctgtgtgtagcgtctagggcagcctttgccctggttccagcagatgggttgtctcttcatagtctatgcatttctgaagaccccacggtgaagggctgcaaggatgaagctgtcccagagtatctccagagtgcaaatcccttggctgccaggtcatgttctctcttcctctcaactgctctcccgaccatataaggagaggcagctgctgggggcgtccccaggatctaaagatagcggcccctgcctggaactctaaatgccaccctggagcgggagccgcaatggcacggcagcacgcccggaccttgtggtacgacaggcccatgtatgtgttcatggagttttgtgttgaggacagcaccgatgtccacgtgcttattgaggatcaccgcattgtgttcagctgcaagaatgccgatggagtggagttgtacaatgagattgagttctatgccaaagtgaactccaaggactcccaggataagcgctcttcccgctctattacttgttttgtgagaaaatggaaggaaaaggtggcctggccgcggcttaccaaggaggatatcaagccagtgtggctgtctgtggactttgataactggagagactgggaaggggatgaagagatggagctggctcatgtggaacattatgcagagcttttgaagaaggtcagcaccaagagacctccacctgccatggatgatttggatgatgattctgacagtgctgatgatgcaacaagtaattaactttctgtgacgcaaagctgggaaggcagctgtggctattttccagttgttctagaaagctagcgcctaggcctttgtcagcgctttggctgtgcaccaagttcttctgagatctctgaactttcctagaagctctttattaagggtcgtccttcaagcttgtcttcctcctaggcacttgactatggctccacatcagatgcagggtcggggaggggtagactggtagggcttctgatttcttactgattggtttctaatctctgtgtttaggccacttgattatttgagtatgtgtgtgtatgtggcaaaacaaaagccaaagaagaatgcagattatagaaatctctactatgtgtgcatatggggcaaagcaaaaagccaaagaagaaacagattataataaatctctaggaactgttctctgtctgtttccttcttgtacttattcctcctggtggcaagcctcttctccctctagtaaccaagctggggtgcttcctcttgcccagatttgtgctctgatttcttacagctaattctggtcatctctagaaccagccacttcagcttcctgcacactctagaaatctctttatactttttttttttnttttttccgagatggagtcttgctctgtcgcccaggctggagtgcagtggtgcagtctctgttcact

SEQ ID NO: 208 - DNA, 973 bp, Homo sapiens
  CDS (48)..(686)
atttggccctcgaggcaagaattcggcacgaggtatctgtggaccttatggaagcaaagactcttggaactgtaacgcccagaaaacctgtcttatctgtcagtgcaagaaaaattaaggacaatgcggctgattggcacaatttaatcctgaagtgggaaaccctcaatgatgcaggttttaccactgcaaataatattgccaacttgaaaatcagtttattgaataaagacaagatagaactagacagcagcagcccagcctcgaaggaaaatgaagaaaaggtgtgtctggaatataacgaggaactggagaagctgtgtgaggaactgcaggccaccttggatgggttgaccaaaatacaggtgaaaatggaaaagctgtcttcaactaccaagggaatttgtgaactagaaaactaccattatggggaggagagtaaacgaccccctctgttccacacgtggcctacaacccatttctatgaggtttcgcataagctcttggagatgtacaggaaggagctgctcctgaagcgcacggtggccaaggagcttgcccacaccggggatcccgacctcaccctgagctacctgtccatgtggctgcaccagccctatgtggagagcgacagcaggctgcatctggagagcatgctgctggagacaggccaccgagctctctgacgtcctgagacggctgcggacactggctccttccacgtctcaccaggcagacagtttgcctaggacccagtgccgcaggcctggatcagaccccaggatcagacctttttggggttttttggccagagcttgtcaccagccccatggcctctccaggggtgctcatgcccacaacccgcggccagccccacgtggtgccgctcagccttttttgcccctcctgggaatctgtcattcgtgggtgcttcagagtaaaatcaatgagtttttgagcaaaaaaaaaaaaa

SEQ ID NO: 209 - DNA, 1504 bp, Homo sapiens
  CDS (242)..(1453)
tcatcgcatagggcggggctcgtacctgacgcccggcttctgggcctgctctcgccctactagggaaaggggtggggcttggctttcgggcgtgggcggaaattgccgagaatcctcggaagctttgcgaaaacacagcgcgccgtcggccgcgctgcgaaccggaagtaatcgaagaagccccggaagtttcgaactaccaccggcgtgcgttcgcaggtagatcgcggtgccagttgccatggagccggccgggccctgtggcttctgcccggcgggggaggtccagccagcgcgttacacctgccctcgctgtaatgcgccctactgctcgctgcgctgctaccggacgcatggcacctgcgcagaaaacttctaccgtgaccaggtgctgggagagctccgcggttgcagcgctcctcccagccgcctagcaagcgccctacgccggctgcgtcagcaacgcgagaccgaggacgagcctggggaagcaggcctcagctccggcccggcgcccggcggcctatcgggactctgggagcggctggcgccgggcgaaaaagctgccttcgagcggctgctgagccgcggtgaggccgggcggctgctgcctccatggcggccgtggtggtggaaccgcggagccggaccgcagcttctggaggagctggataatgccccgggtagtgacgccgcggagctggagctcgcccctgcgaggaccccgccggattctgtgaaagatgcctccgccgcggagcccgcggccgccgagcgggttcttggagatgtcccgggggcctgcacgcccgtcgtacccacccgcatccccgcgatagtcagcctgagccgcggcccagtctcgccgctcgtgcgcttccagctgcccaatgtgctgttcgcctacgcgcatactctcgccctgtatcacggcggtgacgacgcgctgctctctgacttctgtgccacactgctcggcgtttccggagccctgggtgcccagcaagtcttcgcctctgcggaagaagccctgcaggcggcagcccacgtgctggaagcaggcgagcacccgccggggcccctgggcacacgaggggctatgcacgaggtcgcccgcatcctgctgggcgagggcccgaccaaccagaaaggctacacgctggcagcactgggggacctggcacagaccctgggccgtgcccggaaacaggccgtggctagagaagagcgagatcatctttaccgggcccggaaaaagtgccagttcctcctggcctggaccaacgaaaatgaggcggccctcacacccctggctctagactgcgccagggctcaccaagcccatgctgtggtagccgaggaggtggccgccctcactggggagctggagcggctttggggaggccccgtgccacctgccccaagaactctcattgaggagctccctagctgaacgggttaccctggtcattaataaagctgtgactggtcaaaaaaaaaaaaa

SEQ ID NO: 210 - DNA, 1030 bp, Homo sapiens
  CDS (172)..(711)
aaggatccttaattaaattaatcccccccccccgggcggcgtctggcgtggagagtttggggatctacagcagccaaaggcttgtccctgactttatatggctgcgcctggcgagcgactgagtcgtccgtgaggaaaaagaggcgaggcttttccgagatcgtctcagcgatggcgcttcggtcgcagttttgggggttctcggtttgcaggaaccctgggtgcaggttcgcagccctgtcaaccagctccgagccggcagcgaaacctgaagtggaccctgtggaaaatgaagctgtcgccccagaattcaccaaccggaacccccggaacctggagcttttatctgtagccaggaaagagcggggctggcggacggtgtttccctcccgtgagttctggcacaggttgcgagttataaggactcagcatcatgtagaagcacttgtggagcatcagaatggcaaggttgtggtttcggcctccactcgtgagtgggctattaaaaagcacctttatagtaccagaaatgtggtggcttgtgagagtataggacgagtgctggcacagagatgcttagaggcgggaatcaacttcatggtctaccaaccaaccccgtgggaggcagcctcagactcgatgaaacgactacaaagtgccatgacagaaggtggtgtggttctacgggaacctcagagaatctatgaataaatggaagcattaattgttttgaacatgtaaatataaatctgtcagccactacagccatcaaaagagagcatctggaagaacagccagcttggaagttttacagcaataatgttgcagtggaatattatttgtagttaaggtcatcctcctcccctttctgtttttttaaatcaagaactacgttctgcccctctcttgggcttcagaagcatctaagaaaagcagtcatcaattataattaactttcaaagggcaagtcagaagttgtttataaattacaaaataaaggcatattatgaactcttaaaaaaaaaaaaaa

SEQ ID NO: 211 - DNA, 1808 bp, Homo sapiens
  CDS (234)..(1589)
gcacgagggcggaattccagctgcgactgctgagggagaaaatgatgcccaggttgggctccccggcccaccggccgaggagaggcctgcgctgcacacgcgcagaccgagcatccgcgtcaagaggcgaagagagcgcgcgctccccacgtcctgcgctcctggctgccgggcattcgtctcagccgtgactctcgccaggccggggctggcgcgcccacgtctgaagagcgatgccccgggagatcatcaccctgcagctgggccagtgcggcaaccagattgggttcgagttctggaaacagctgtgcgccgagcatggtatcagccccgagggcatcgtggaggagttcgccaccgagggcactgaccgcaaggacgtctttttctaccaggcagacgatgagcactacatcccccgggccgtgctgctggacttggaaccccgggtgatccactccatcctcaactccccctatgccaagctctacaacccagagaacatctacctgtcggaacatggaggaggagctggcaacaactgggccagcggattctcccagggtgagaaaattcatgaagacatctttgacatcatagaccgagaagcagatggaagtgacagtttggagggcttcgtgctgtgtcactccatcgctgggggtacgggttctggcctgggctcctacctcctggagcgactgaatgacaggtaccccaagaagctagtgcagacttattcagtgtttccctaccaggacgagatgagcgacgtagtggttcagccctacaattcactcctgacactcaagaggctgacgcagaacgcagattgtgtggtggtgctggacaacacagccctgaaccggattgccacagaccgcctgcacatccagaacccgtccttctcccagatcaaccagctggtgtccaccatcatgtcggccagcaccaccaccctgcgctaccccggctacatgaacaatgacctcatcggcctcatcgcctcgctcattcccaccccacggctccacttcctcatgaccggctacaccccgctcactacagaccagtcagtggccagcgtgaggaagaccacggtcctggatgtcatgaggcggctgctgcagcccaagaacgtgatggtgtccacaggccgagaccgccagaccaaccactgctacatcgccatcctcaacatcatccagggagaggtggaccccacccaggtccacaagagcctgcagaggatccgggaacggaagttggccaacttcatcccgtggggccccgccagcatccaggtggccctgtcgaggaagtctccctacctgccctcggcccaccgggtcagcgggctcatgatggccaaccacaccagcatctcctcgctctttgaaagttcctgccagcagtttgacaagctgcggaagcgggatgccttcctcgagcagttccgtaaggaggacatgttcaaggacacctttgatgagatggacaggtctagggaggttgttcaggagctcattgatgagtaccatgcggccacccagccagactacatttcctggggcacccaggagcagtgatttcccctccccactactccttctccttctagatggtaaccacagcctcgaccatgcctgctccctctgacccagcttcacctcatggacaacccttcttggttcatctccagcccgtgagctggtcctgcttcctcccttccatgccctaacttttaatatgcttgttcagctctaataaagtaataaagcttggttgtcagtataaaaaaaaaaaaa

SEQ ID NO: 212 - DNA, 6482 bp, Homo sapiens
  CDS (330)..(5801)
gactcaccgtctgaaaagccagcttaaagtgggagggcctgggagtagaaggtaaaaagggagtggtgagaatgaatgtgagaaggaagccaggacagcgcagtccccagtcccgaacggccagggagaggaggtggcctagcgctggcggggctcaccccaatccgtctgccttttgatgccgtactctgctggttgcgcagccacctcgggatactgcacacggagaggagggaaaataagcgaggcaccgccgcaccacgcgggagacctacggagacccacagcgcccgagccctggaagagcactactggatgtcagcggagaaatggctttgagctcagcctggcgctcggttctgcctctgtggctcctctggagcgctgcctgctcccgcgccgcgtccggggacgacaacgcttttccttttgacattgaagggagctcagcggttggcaggcaagacccgcctgagacgagcgaaccccgcgtggctctgggacgcctgccgcctgcggccgagaaatgcaatgctggattctttcacaccctgtcgggagaatgtgtgccctgcgactgtaatggcaattccaacgagtgtttggacggctcaggatactgtgtgcactgccagcggaacacaacaggagagcactgtgaaaagtgtctggatggttatatcggagattccatcaggggagcaccccaattctgccagccgtgcccctgtcccctgccccacttggccaattttgcagaatcctgctataggaaaaatggagctgttcggtgcatttgtaacgaaaattatgctggacctaactgtgaaagatgtgctcccggttactatggaaaccccttactcattggaagcacctgtaagaaatgtgactgcagtggaaattcagatcccaacctgatctttgaagattgtgatgaagtcactggccagtgtaggaattgcttacgcaacaccaccggattcaagtgtgaacgttgcgctcctggctactatggggacgccaggatagccaagaactgtgcagtgtgcaactgcgggggaggcccatgtgacagtgtaaccggagaatgcttggaagaaggttttgaaccccctacaggcatggactgcccaaccataagctgtgataagtgcgtctgggacctgactgatgcactgcggttagcagcgctctccatcgaggaaggcaaatccggggtgctgagcgtatcctctggggccgccgctcataggcacgtgaatgaaatcaacgccaccatctacctcctcaaaacaaaattgtcagaaagagaaaaccaatacgccctaagaaagatacaaatcaacaatgctgagaacacgatgaaaagccttctgtctgacgtagaggaattagttgaaaaggaaaatcaagcctccagaaaaggacaacttgttcagaaggaaagcatggacaccattaaccacgcaagtcagctggtagagcaagcccatgatatgagggataaaatccaagagatcaacaacaagatgctctattatggggaagagcatgaacttagccccaaggaaatctctgagaagctggtgttggcccagaagatgcttgaagagattagaagccgtcaaccatttttcacccaacgggagctcgtggatgaggaggcagatgaggcttacgaactactgagccaggctgagagctggcagcggctgcacaatgagacccgcactctgtttcctgtcgtcctggagcagctggatgactacaatgctaagttgtcagatctccaggaagcacttgaccaggcccttaaccatgtcagggatgccgaagacatgaacagggccacagcagccaggcagcgggaccatgagaaacaacaggaaagagtgagggaacaaatggaagtggtgaacatgtctctgagcacatctgcggactctctgacaacacctcgtctaactctttcagaacttgatgatataataaagaatgcgtcagggatttatgcagaaatagatggagccaaaagtgaactacaagtaaaactatctaacctaagtaacctcagccatgatttagtccaagaagctattgaccatgcacaggaccttcaacaagaagctaatgaattgagcaggaagttgcacagttcagatatgaacgggctggtacagaaggctttggatgcatcaaatgtctatgaaaatattgttaattatgttagtgaagccaatgaaacagcagaatttgctttgaacaccactgaccgaatttatgatgcggtgagtgggattgatactcaaatcatttaccataaagatgaaagtgagaacctcctcaatcaagccagagaactgcaagcaaaggcagagtctagcagtgatgaagcagtggctgacactagcaggcgtgtgggtggagccctagcaaggaaaagtgcccttaaaaccagactcagtgatgccgttaagcaactacaagcagcagagagaggggatgcccagcagcgcctggggcagtctagactgatcaccgaggaagccaacaggacgacgatggaggtgcagcaggccactgcccccatggccaacaatctaaccaactggtcacagaatcttcaacattttgactcttctgcttacaacactgcagtgaactctgctagggatgcagtaagaaatctgaccgaggttgtccctcagctcctggatcagcttcgtacggttgagcagaagcgacctgcaagcaacgtttctgccagcatccagaggatccgagagctcattgctcagaccagaagtgttgccagcaagatccaagtctccatgatgtttgatggccagtcagctgtggaagtgcactcgagaaccagtatggatgacttaaaggccttcacgtctctgagcctgtacatgaaaccccctgtgaagcggccggaactgaccgagactgcagatcagtttatcctgtacctcggaagcaaaaacgccaaaaaagagtatatgggtcttgcaatcaaaaatgataatctggtatacgtctataatttgggaactaaagatgtggagattcccctggactccaagcccgtcagttcctggcctgcttacttcagcattgtcaagattgaaagggtgggaaaacatggaaaggtgtttttaacagtcccgagtctaagtagcacagcagaggaaaagttcattaaaaagggggaattttcgggagatgactctctgctggacctggaccctgaggacacagtgttttatgttggtggagtgccttccaacttcaagctccctaccagcttaaacctgcctggctttgttggctgcctggaactggccactttgaataatgatgtgatcagcttgtacaactttaagcacatctataatatggacccctccacatcagtgccatgtgcccgagataagctggccttcactcagagtcgggctgccagttacttcttcgatggctccggttatgccgtggtgagagacatcacaaggagagggaaatttggtcaggtgactcgctttgacatagaagttcgaacaccagctgacaacggccttattctcctgatggtcaatggaagtatgtttttcagactggaaatgcgcaatggttacctacatgtgttctatgattttggattcagcagtggccctgtgcatcttgaagatacgttaaagaaagctcaaattaatgatgcaaaataccatgagatctcaatcatttaccacaatgataagaaaatgatcttggtagttgacagaaggcatgtcaagagcatggataatgaaaagatgaaaataccttttacagatatatacattggaggagctcctccagaaatcttacaatccagggccctcagagcacaccttcccctagatatcaacttcagaggatgcatgaagggcttccagttccaaaagaaggacttcaatttactggagcagacagaaaccctgggagttggttatggatgcccagaagactcacttatatctcgcagagcatatttcaatggacagagcttcattgcttcaattcagaaaatatctttctttgatggctttgaaggaggttttaatttccgaacattacaaccaaatgggttactattctattatgcttcagggtcagacgtgttctccatctcactggataatggtactgtcatcatggatgtaaagggaatcaaagttcagtcagtagataagcagtacaatgatgggctgtcccacttcgtcattagctctgtctcacccacaagatatgaactgatagtagataaaagcagagttgggagtaagaatcctaccaaagggaaaatagaacagacacaagcaagtgaaaagaagttttacttcggtggctcaccaatcagtgctcagtatgctaatttcactggctgcataagtaatgcctactttaccagggtggatagagatgtggaggttgaagatttccaacggtatactgaaaaggtccacacttctctttatgagtgtcccattgagtcttcaccattgtttctcctccataaaaaaggaaaaaatttatccaagcctaaagcaagtcagaataaaaagggagggaaaagtaaagatgcaccttcatgggatcctgttgctctgaaactcccagagcggaatactccaagaaactctcattgccacctttccaacagccctagagcaatagagcacgcctatcaatatggaggaacagccaacagccgccaagagtttgaacacttaaaaggagattttggtgccaaatctcagttttccattcgtctgagaactcgttcctcccatggcatgatcttctatgtctcagatcaagaagagaatgacttcatgactctatttttggcccatggccgcttggtttacatgtttaatgttggtcacaaaaaactgaagattagaagccaggagaaatacaatgatggcctgtggcatgatgtgatatttattcgagaaaggagcagtggccgactggtaattgatggtctccgagtcctagaagaaagtcttcctcctactgaagctacctggaaaatcaagggtcccatttatttgggaggtgtggctcctggaaaggctgtgaaaaatgttcagattaactccatctacagttttagtggctgtctcagcaatctccagctcaatggggcctccatcacctctgcttctcagacattcagtgtgaccccttgctttgaaggccccatggaaacaggaacttacttttcaacagaaggaggatacgtggttctagatgaatctttcaatattggattgaagtttgaaattgcatttgaagtccgtcccagaagcagttccggaaccctggtccacggccacagtgtcaatggggagtacctaaatgttcacatgaaaaatggacaggtcatagtgaaagtcaataatggcatcagagatttttccacctcagtaacacccaagcagagtctctgtgatggcagatggcacagaattacagttattagagattctaatgtggttcagttggatgtggactctgaagtgaaccatgtggttggacccctgaatccaaaaccaattgatcacagggagcctgtgtttgttggaggtgttccagaatctctactgacaccacgcttggcccccagcaaacccttcacaggctgcatacgccactttgtgattgatggacacccagtgagcttcagtaaagcagccctggtcagcggcgccgtaagcatcaactcctgtccagcagcctgacatgacagagcacagctgcccaaatacaaagttctttagagcactgaaagaaacacaaagccagccaggaggaacagtaactcttccttcgggtggaagctttcatcgagttgaacaggacttaaacgaatcatcagggaccggatatttcttatttctcatttggattcttaaccttgaatccaaagtgtctgcaatggacaacaattgaaggagtggcaaacttacttgtattgagagcacacgcaattcctactggtgaaattactgtttctgtttctaataaaatagaagggattccaaataaacacttgcacacatttttgaagtgcggctagattctcagattcacctttcttccagggaagataactttcaatctatataaaaatctctgtcctaaaactacctttctttattttgaagagacttactaacttacatataatctaaattagatgatagatttgtttttagcccttttgtttggtctatcagtataagaagaatattttaggtttatagctgaagttatcaaggtttaataaagtaaatttctaacagaatactagaaaaatgcagtataatttaattttttctaaataagaaacacaggaaatcaactactttttccccttccttatctccttaaaagaaaaataaaattgtacatgagaaaaa

SEQ ID NO: 213 - DNA, 1400 bp, Homo sapiens
  CDS (312)..(1295)
cacgaggggctttacatcctgtctttgaaggagacaatgtcattctgagatgtcaggggaaagacaacaaaaacactcatcaaaaggtttactacaaggatggaaaacagcttcctaatagttataatttagagaagatcacagtgaattcagtctccagggataatagcaaatatcattgtactgcttataggaagttttacatacttgacattgaagtaacttcaaaacccctaaatatccaagttcaagagctgtttctacatcctgtgctgagagccagctcttccacgcccatagaggggagtcccatgaccctgacctgtgagacccagctctctccacagaggccagatgtccagctgcaattctccctcttcagagatagccagaccctcggattgggctggagcaggtcccccagactccagatccctgccatgtggactgaagactcagggtcttactggtgtgaggtggagacagtgactcacagcatcaaaaaaaggagcctgagatctcagatacgtgtacagagagtccctgtgtctaatgtgaatctagagatccggcccaccggagggcagctgattgaaggagaaaatatggtccttatttgctcagtagcccagggttcagggactgtcacattctcctggcacaaagaaggaagagtaagaagcctgggtagaaagacccagcgttccctgttggcagagctgcatgttctcaccgtgaaggagagtgatgcagggagatactactgtgcagctgataacgttcacagccccatcctcagcacgtggattcgagtcaccgtgagaattccggtatctcaccctgtcctcaccttcagggctcccagggcccacactgtggtgggggacctgctggagcttcactgtgagtccctgagaggctctcccccgatcctgtaccgattttatcatgaggatgtcaccctggggaacagctcagccccctctggaggaggagcctccttcaacctctctctgactgcagaacattctggaaactactcctgtgatgcagacaatggcctgggggcccagcacagtcatggagtgagtctcagggtcacagttccggtgtctcgccccatcctcaccctcagggctcccagggcccaggctgtggtgggggacctgctggagcttcactgtgaggccccgagaggctctcccccaatcctgtactggttttatcatgaggatgtcaccctggggagcagctcggcccctctggaggagaagcttctttcaacctctctctgactgcagaacattctggaaactactcatgtgaggccaacaatggcctagtggccagcacagtgacacaatatcactcagtgttatagttcagtatctcgtccatct

SEQ ID NO: 214 - DNA, 2560 bp, Homo sapiens
  CDS (144)..(2501)
cgcggccgcgtcgactttaagattaaattcatgtattgaaaatattgttcagaccccatgtgacataactggagccagtgcagtgccatgaagaactacgagattagcctggatattaacttgtcttctagagaatagatttcatgttccattcttctgcaatggttaattcacacagaaaaccaatgtttaacattcacagaggattttactgcttaacagccatcttgccccaaatatgcatttgttctcagttctcagtgccatctagttatcacttcactgaggatcctggggctttcccagtagccactaatggggaacgatttccttggcaggagctaaggctccccagtgtggtcattcctctccattatgacctctttgtccaccccaatctcacctctctggactttgttgcatctgagaagatcgaagtcttggtcagcaatgctacccagtttatcatcttgcacagcaaagatcttgaaatcacgaatgccacccttcagtcagaggaagattcaagatacatgaaaccaggaaaagaactgaaagttttgagttaccctgctcatgaacaaattgcactgctggttccagagaaacttacgcctcacctgaaatactatgtggctatggacttccaagccaagttaggtgatggctttgaagggttttataaaagcacatacagaactcttggtggtgaaacaagaattcttgcagtaacagattttgagccaacccaggcacgcatggctttcccttgctttgatgaaccgttgttcaaagccaacttttcaatcaagatacgaagagagagcaggcatattgcactatccaacatgccaaaggttaagacaattgaacttgaaggaggtcttttggaagatcactttgaaactactgtaaaaatgagtacataccttgtagcctacatagtttgtgatttccactctctgagtggcttcacttcatcaggggtcaaggtgtccatctatgcatccccagacaaacggaatcaaacacattatgctttgcaggcatcactgaagctacttgatttttatgaaaagtactttgatatctactatccactctccaaactggatttaattgctattcctgactttgcacctggagccatggaaaattggggcctcattacatatagggagacgtcactgctttttgaccccaagacctcttctgcttccgataaactgtgggtcaccagagtcatagcccatgaactggcgcaccagtggtttggcaacctggtcacaatggaatggtggaatgatatttggcttaaggagggttttgcaaaatacatggaacttatcgctgttaatgctacatatccagagctgcaatttgatgactattttttgaatgtgtgttttgaagtaattacaaaagattcattgaattcatcccgccctatctccaaaccagcggaaaccccgactcaaatacaggaaatgtttgatgaagtttcctataacaagggagcttgtattttgaatatgctcaaggattttctgggtgaggagaaattccagaaaggaataattcagtacttaaagaagttcagctatagaaatgctaacaatgatgacttgtggagcagtctgtcaaatagttgtttagaaagtgattttacatctggtggagtttgtcattcggatcccaagatgacaagtaacatgctcgcctttctgggggaaaatgcagaggtcaaagagatgatgactacatggactctccagaaaggaatccccctgctggtggttaaacaagacgggtgttcactccgactgcaacaggagcgcttcctccagggggttttccaggaagaccctgaatggagggccctgcaggagaggtacctgtggcatatcccattgacctactccacgagttcttctaatgtgatccacagacacattctaaaatcaaagacagatactctggatctacctgaaaagaccagttgggtgaaatttaatgtggactcaaatggttactacatcgttcactatgagggtcatggatgggaccaactcattacacagctgaatcagaaccacacacttctcagacctaaggacagagtaggtctgattcatgatgtgtttcagctagttggtgcagggagactgaccctagacaaagctcttgacatgacttactacctccaacatgaaacaagcagccccgcacttctcgaaggtctgagttacttggaatcgttttaccacatgatggacagaaggaatatttcagatatctctgaaaacctcaagcgttaccttcttcagtattttaagccagtgattgacaggcaaagctggagtgacaagggctcagtctgggacaggatgctccgctcggctctcttgaagctggcctgtgacctgaaccatgctccttgcatccagaaagctgctgaactcttcttccagtggatggaatccagtggaaaattaaagtagatgtagacttctgtcctaccctttgttcttttctttttgaggaaaaagtcttgatccaa

SEQ ID NO: 215 - DNA, 701 bp, Homo sapiens
  CDS (333)..(611)
atctgacactctccccctccttctccaacacttggttaggtggctcttctatgttctcctataacacactacacttctcccagcacagaacttaccacactgcacagtggtctgtttgccaatcagagaagcaacacgccagcatggcagggaatccaggctttgggggcggacagttctgggtttgaaaatatccccacctctcactagctgtatgactatcagcaagttactaaatctctaggctttgaactcctcatctgtaacacgggctagaaacacctacctcacatggttgctgcaaagactaaatcagacaaggcaggaagaacatggtacaagcacctaagaagcactcagtaagtggtagttattttttattattttttgagacgaggtctgtcacgcaggctggagtacagcggcatgatcatggctcactgcagtctcaaccacccagactcaagcgatcctcccacctcagcctccagagtagctgggaccacagatgtgtaccatcacactcagctaattttaaaattatgaatatttgtagaggtgaggtctcactacgttgcccaggatggtctcgagctcctgacctcaagtgatctgcccaccttggcctcccaaagtgctggaattacaggctgagccaccacacccggcctattatttccctattataatggaactaagag

SEQ ID NO: 216 - DNA, 6222 bp, Homo sapiens
  CDS (1)..(4284)
atgggtaagccactcagcagaccagactgtttaaggcggaaccccagctgcctggggaaaggagaggaggaggatggctacatagaggactgctatgttccacaacggtctatatatgatacgatgaggataaatgagcaaattgaccaggggtcaaagcttaaccagacttcaaaaagcaccatggaaaagatggaaggaagtactatatccagcaatggtacattaggagcagcatctaatgtttttgaatctagagcaccagaaggtaagaagctggatgagaggataatatttgatgcactaaagctaagcagtgatgtgcagaagtcagcacctgtgccacccagaaggcggccaaatgcagaacgcaaagacaatgttaacaggagatcgtggaagtccttcatgccacccaacttcccagaatttgcagagaggatagaagcttctctcagtgaggtttcagaagctggtgcttcaaatccttccttgcaagagaagaaggagtccagttctgcattaacagaaagttctggtcatttggaccacagggaacctcagtcagagtcagtaactctggaacatgtgtccaaatccataggtattccagaggtgcaagattttaaaaacttaagtggagactgccaggactttagatttcagcagcacagtgcaaaccctcctcatgaattccagcctgtagaatcagaagctgtagcaacaagtggtaacacagatgtaatgcaggaatccagattctcaagtgcaacctggccgagggccacaaaaagtttagctaagggaggcttcagtgagaagcagcacccccttggggacacagcctgcactgtggaaatgccacctctctccccttgcctgagtgaagagctgttagatccagaattgcatgttctcataacccccagcctgagagagaaaacagagtctgagctaaagtttgaggaggatgagcgatggattatgatggaggctgagggagagtgggaggaagagaaactgtcagacagggaaaagacttttctggtggcagatgagaagaacagcctggcagatatttttgaagaaagagaacaagcaaacacagcagtggtggaggatggatccgattgcttagctgctgtcttgaggacttttggccacctatctcttggtcagatttgttgccctgatgacccacagccagccaaggaccagttggctactgttcccaaggatatacccctggattgcgattgtgttcttacaggtgaggatattctcggtgaggtggcaaacagaactgctcaggggttagagggacttgtttcagattcagcatgtactgtgggtactattgatgcagaacagctctctgacacagactcagtgcagatgtttcttgaacttgaaaaggagtgtttatgtgaagaaggagtaactcctctagttgagctacagaatcaaatctcttctgaagggctggctgcatcccaggatgcagaaaatttactcgtaattagtcatttttcaggggctgccttagaaaaggaacagcatttaggccttttacatgtaagggcaaaagattatgatactagattggattgtggatattttaataccctggattcttctcaggtgcctaatgctgtggaacttattgcccacgttgatatcatgagagacacttccactgttagcaaggaggaatgtgaaaaagtgccttttagccccaggactgcagaatttaagtccagacagccagctgatctggattcactggaaaagctggacccaggaggactgctgaactctgatcacagggtttctcatgaagaaaaattatcaggcttcattgcttctgagctggccaaagacaatggcagtttgtcccagggagactgcagtcaaactgaggggaatggtgaggagtgcattgagagggtcaccttcagttttgcttttaatcatgaactaacagatgttacctcaggacctgaagtagaggtgttatatgaatcaaatttactaacagatgaaattcatttggaaagtgggaatgtaactgttaatcaagaaaataacagtctgacatcaatgggaaatgtggtcacttgtgaattgtctgtggagaaagtttgtgatgaggatggtgaggcaaaagagctggattatcaagccacacttttggaggatcaagctccagcacatttccacagaaacttcccagagcaggtcttccaggatctccagaggaagtccccagagtcagagattctgagtctgcacctgctggttgaagaactgagacttaatccagatggagtggaaactgtgaatgatacaaagcctgagctgaatgtggcatcatcagagggaggggagatggaaaggagagattcagattcattcctaaatatttttccagagaaacaagttaccaaggctggtaatactgaaccagttttagaggaatggatacccgtcctccagagaccttcccggactgctgcagtacccactgtcaaagatgccctagatgctgcactgcccagcccagaggagggtacctcaattgctgcagtgcctgccccagagggaactgctgtagttgctgctttagtgccctttccacatgaggacatcctagttgcttcaatagtctccttagaggaggaggatgtcacagctgctgcagtatcagccccagagagggctactgtcccagctgttacagtatctgtccctgaagggactgctgcagttgctgcagtgtcctccccagaggagactgctccagctgttgcagcagccatcacacaggagggtatgtcagctgtcgcagggttctccccagagtgggctgctttagctattacagtacccatcacagaggaggatggtacaccagaagggcctgtcaccccagctaccacagtgcatgctccagaggagcctgatactgcagctgtcagagtgtccaccccagaggagcccgcctccccagctgctgcagtgcccaccccagaggagcccacctccccagctgctgcagtgcccaccccagaggagcccacctccccagctgctgcagtgccccccccagaggagcccacctccccagctgctgcagtgcccaccccagaggagcccacctccccagctgctgcagtgcccaccccagaggagcccacctccccagctgctgcagtgcccaccccagaggagcccacctccccagctgctgcagtgcccaccccagaggagcccacctccccagctgctgcagtgcccaccccagaggagcccacctccccagctgctgcagtgcccaccccagaggagcccgcctccccagctgctgcagtgcccaccccagaggagcccgcctccccagctgctgcagtgcccaccccagaggagcctgccttcccagctcctgcagtgcccaccccagaggaatccgcctccgcagctgttgcagtgcccacccccgaggaatctgcctccccagctgctgcagtgcccaccccagcagaatctgcctcctttgcagctgtggtggccaccctggaggaacccacttccccggcagcttcagtgcccacccctgcagctatggtggccaccctagaggaattcacttccccggcagcttcagtgcccacctctgaggagcctgcctccctagcagctgcagtgtccaacccagaggagcccacctccccagcagcagcagtgcccaccctagaggaacccacctcctcagcagctgcagtgctcaccccagaggaactcagttccccagcagcttcagtgcccacccccgaggagcctgcctccccagcagctgcagtgtccaacctagaggagcccgcctccccagcagcagcagtgcccaccccagaggtggctgccatccctgctgcttcagtgcccaccccagaggtgcctgccatcccagctgctgcagtgcctcctatggaggaagtttcccccattggtgtgcccttcctgggagtttctgcccacactgactcagtgcctatttcagaagaaggaacacctgttctagaggaggcttcctccactggaatgtggatcaaggaggaccttgattccctagtatttggcataaaagaggtgaccagcacagtgctacatgggaaagtgcctctggctgcaaccgctggattaaattcagatgaggtaattgtccattttgattctgggaagggtctaaagagtaaagtgagatttgcagggctgacctggtggtgatgagaaatggcacagatagttcttttgttctttttgggtctcccgggcttatagtttgtagtctttctgttcagtttttggggaaaatatactttaattttgtctggtgaaagactttataatttcatgcttcgttttttattcagataagccaatcccacggaaaacagggatataaacagttgttgatttacatttttaaaaagattattagcaggaaagggtcattctgtttttgaattatacagtgagcatgttcttgcctaaaccaagagacagtttattcattggtggtgtcaacatttaggtagaggccagagtgtgagctttggaatgagacctggggtgcttcctaaccactctgggaaaattagttagctattcttgagtttcctgtttcttcatttgttaaggcataactctgtgaggataaaatgagatacatttaaggtaccaagcgtataagattaccaatcactggccatatcctccccattcttttcaaataggtatgttggttggttgaaagaatttaccaaagtagattggagagaagcaataaagctaaatgattaagaacttttaaatgcaaatatgtgtttctgaaaaccagagctaggcataatgtttatgaaaaatagagatattttagtcatctttgtcaaactgcctttgtgtccttaagcaagtcattttcctttccaggacctcatttcttcattataaaacaagaaaattgggctaaatgtcctcttgggtctctcttggctctaagattctttttattttttttttttagatggagtctggctctgtcagtcaggctggagtgctggagtgcagtggtgcggtctcggctcactgcaggctccgcctcccgggttcacgccattctcctgcctcagcctcccgagtagctgggactgcaggcgcccgccactacgcccggcaattttttgtatatatatatatataattttttttttttttttttagtggagacgggtttcactgtgttggccaggatggtctcggtctcctgacctcgtggtctgcccgcctcggcctcccagagtgctgggattgcaggcgtgagccaccgcgcccagccggctctaagattcttaatgttagagaaccgaatgtgttaggaaacagttggaaacgatgttccacatccttgagcactcctagtccaaggaatttgagatcagcagctttccacagttaattacccaggtttgatttggtcagtggtaaagagtgcaggagttagaggtttaatctgaacacaagagatgactgagtgagaagattgttttgattttactgcgcccctaggactcaaaatagtgccttcttcatagcaggcatttgctgttgactgactgactgaatgcatgaatatcaatttcctagactatggatggatgctacaagaaagatgggttttctcattcacctcactgcagagcctttcagggcagccttaagtcagctagagcaccagctaaacatgcaggtcctgacaacaaaatcattttgattgcatgccataaactctttgattaagaggattgattaagataatctggccttgctgagtggtggtggttttaccttgagctttaccagttattttgtcaggtagcattccattaaattaggatgcatcatctttgagactgatggatttttgattcatttttccgagttttattgaatttggaatgacaccgagatcccaatagcctgtacaaagtgaagacagtaggtcaacaacagagccattcttgataatacagaatatttcacaccaggcacggtggctcgcgcctctaatcccaacatttgggaagccaagggaagaggattgcttgaggccaggagttcgagaacagcctaggcaacatagtaagaccccatctctgagaaaat

SEQ ID NO: 217 - DNA, 1412 bp, Homo sapiens
  CDS (74)..(1156)
gcaggaattccgcacgagcccttcgcaagccctcatttcaccaggcccccggcttggggcgccttccttccccatggcgggacacctggcttcagatttcgccttctcgccccctccaggtggtggaggtgatgggccaggggggccggagccgggctgggttgatcctcggacctggctaagcttccaaggccctcctggagggccaggaatcgggccgggggttgggccaggctctgaggtgtgggggattcccccatgccccccgccgtatgagttctgtggggggatggcgtactgtgggccccaggttggagtggggctagtgccccaaggcggcttggagacctctcagcctgagggtgaagcaggagtcggggtggagagcaactccgatggggcctccccggagccctgcaccgtcacccctggtgccgtgaagctggagaaggagaagctggagcaaaacccggaggagtcccaggacatcaaagctctgcagaaagaactcgagcaatttgccaagctcctgaagcagaagaggatcaccctgggatatacacaggccgatgtggggctcaccctgggggttctatttgggaaggtattcagccaaacgaccatctgccgctttgaggctctgcagcttagcttcaagaacatgtgtaagctgcggcccttgctgcagaagtgggtggaggaagctgacaacaatgaaaatcttcaggagatatgcaaagcagaaaccctcgtgcaggcccgaaagagaaagcgaaccagtatcgagaaccgagtgagaggcaacctggagaatttgttcctgcagtgcccgaaacccacactgcagcagatcagccacatcgcccagcagcttgggctcgagaaggatgtggtccgagtgtggttctgtaaccggcgccagaagggcaagcgatcaagcagcgactatgcacaacgagaggattttgaggctgctgggtctcctttctcagggggaccagtgtcctttcctctggccccagggccccattttggtaccccaggctatgggagccctcacttcactgcactgtactcctcggtccctttccctgagggggaagcctttccccctgtctctgtcaccactctgggctctcccatgcattcaaactgaggtgcctgcccttctaggaatgggggacagggggaggggaggagctagggaaagaaaacctggagtttgtgccagggtttttgggattaagttcttcattcactaaggaaggaattgggaacacaaagggtgggggcaggggagtttggggcaactggttggagggaaggtgaagttcaatgatgctcttgattttaatcccacatcatgtatcacttttttcttaaataaagaagcttgggacacagtaaaaaaa

SEQ ID NO: 218 - DNA, 365 bp, Homo sapiens
  CDS (16)..(345)
gagagagctagcaccatgagcttcaataccctgctccatcatcctggctccctgctccatcatcccggcttccctgctccatcatcccggcttccctgctccatcatcccagcttccctcctccatcatcccaactgccgtgctctatcattccagctccagcgtgtttcatcccagatggcgtgctccatcatcccagctgtagtgctccatcatgcgaggtccccggtccatcatcctggcccccccgctccatcatcctggctgcatggtccatcttcctgctcgccactctgtcatcacaaccgccccctccatcatctaggcctccgtggtacatcataaaggctccgtgcaccatcata

SEQ ID NO: 219 - DNA, 2047 bp, Homo sapiens
  CDS (338)..(2047)
gcacgaggagcttttcagagccaaggatagctgagttggaaataagctgaaatgaatacatgactgggaataatggggactgcctgtgaggcctctgaaataattgaaggcaagatgaaggaactatctgaagaaatcactacactcttagagaatccctctgttctccagcaaacatgggatgtaaagcctcacagggaatctgataatacatacttctgtcaaccagaaccagaggggtagttttcttttccctccagaggcagcctttggtacttaaaatatctgtagctgattaaatttttcccaacaacctcactggggagaaagtgtgttcatgttttgtccagcggatcaggatgttaggatgacgagcaagagtccaggtcactgtgcctttgctgtgttgtatggaaaggatggcagggaacatgctaccaccaggtggcccattactcgagatgatcatcacaaccagatgatgctaacctatatcctctacccttcgcgtgctttgtctgggaagtcttttggccccatgtcagtttctattgcattgagagcccaagagcccctgtgcaaagacaacgggccgagagctctgagacccagtggggatgtgcttttcctgactgacaggacagttggtcagtgccagacattggccgtcaccaccatttctcctacagctaaggttctgcaacccaaaggtgccatagaaaatcagctagacataaaggttctgcacgtccccaccagattcaggagcccagctggcttcacccagtggatcccgcactggggctgcaggtggagctgcctgccagtcccgcaccgtgtgcccgcactcctcagcccttgggttgtcgatgggactgggtgccgtggagcagggggcggcgctcgtcagggaggctcgggccgcacaggagcccacggagcggggggaggctcaggcatggcgggctgcaggtcccgagccctgccccacgggaaggcagctaaggcccggcgagaaatccagcacagcgctggtgggccggcactgctgggggacccagcgcaccctccgcagccgctggcccgggtgctaagcccctcattgcccggggcccgcagggccggccagctgctccgactgccgggccgccaagcccacgcccacccggaactccagctggcccgcaaacgccgcacgcagccccggttcccgctcgcgcctctccctccacacctccctgggaagcatgcagatgggcaggttgtggagagcgtgggctctgaccccacagcagcatctagggttgagtgtttacaactcccgaagccccagtgggcgtgtgttacaatgcgctttttcagttttgccgtccacaggcagcttgtgttaatcagctcaattagaccctctgtcttattgcaaggacagaaggctttctgtatcccgggttcttgccttagtgtactggaaaaatcggatcacacgtgggccttattgaatggcggaagtagctctcagcagatggatggggagccagaagggggatggagtgggaaggtggggccttggaggaccctgggtaataaaaatccaatgggcacaacgtggtttcggctttgcagcacgtggcttctggctgcagacgcagactgggactacacaccagctctcctggatctccagcttgctgcctgcagatcttgggacttctcagtttccataatcatgtcagccaattccttacaagaaatctctctgtctatatatcctattggttctgttttctggagaacccttactgatatacaggtcaaggtagcaggtgctgtggcctttcttagggggacatctagacaatcctggtcaccagtgagatttggggatgcagcccctatttattacctggattttcttacagaaatggttctaggagcaccagcaggcttttacccttacctgggacagaggatgcatggagatggaggaggacaaatccagttttatctagagaagattggggctaaaccagaaactgcaaaactgtga

SEQ ID NO: 220 - DNA, 1181 bp, Homo sapiens
  CDS (373)..(678)
ctcattacgccatgcttggcacgaggtggcacgagggctgcaaggaagggcaccagcatgcaggctgcccactggagggtccgggtgctgcgggcaaaagttcagcgcttgtccaccctcccttagctctgactcagtgcatcctactgtggggacatctcgtgaggggacacgaaatgactgatctcaccctttcccagtattcagagctgtgaacccctgtggcgcaggactggcctgtgtctgttattttggttgtaaatcattctcctgtggaattggcaaaagctacatttttactgtccttaccagcaacagtttgcgtcgtcacatgctgtgagtgtgggctgtggtgtgtccgtgtgtgtacatatgtgtatatgtatatatcacgcagcaggagtgtcattcatgctgctgtcccctggtgaagtgacaagtacaattaaaggtggctctgaaatggcctctggtttcttgggagtcgggcagggacctgcaggaggctttcccagcaggtgcacagaaggaagcgctgagcccactgtgtgcagagggtgtgtgcccagggcactgccacggcccccaccagcattggcctctgctctgcagggtggggtgcccatcctgggggctgtgtgtcatgctcacctgacccaggtgtgtgtcccggtgtgaaatcgaggaggggactggaagcccttccctgccttgaaacatgaaagctgattttctgagcagcagatacggtcagtggcaaagctgcatctgaagggcggcctgggaaggggccctgtgctggccccgggtccgccccagaggagtccacacagcaccacctccagaaggggctgggcccggggtcctgcaggcggcaccttttggtagagtttgtttccctggaaaatggggaaaatgtttcaagccaggtgaggggggaagttaacactgaaatatgtattgtttttaaaaatcaaatgcacacgcatggaagctgcttgtccatgcactggttttgtcactggcgtcctggaatccgaccgtgttggggtgcaggcgctgtcagactccggctgatcctggctcgagcacacacatctaagggccaggctggttccgcatggtgatctccgtcttgtatgtctgaatgttggcctaaaataaagattactgttgtaaaa

SEQ ID NO: 221 - DNA, 2385 bp, Homo sapiens
  CDS (464)..(2344)
cgcggctgggagaacggcgcgcgccccgctcggcagctgcggcggcggctggtgtaggcgctcacgtcagggctgggaggagggggttcgcagctcagagagagagagacatgaggcaacctggcaggaagcgagaaagagttcggcgaagaaggagtgagttctagagacgccccgcgagcaggacccgcgcctgcaggagagcctggccgacccggctcctcgccttctctgcgcgctctcccgcgtccgctttcagcaccccgagcggagaacagttcccggcagcccgcagcgctgccgagtggccgccggccggccgagtacccggagctccagggggctcaggagcaccctctgagaacccgctgtgcacccaccttttcccctcttttggtgggcaagtaagcacgggggaaaagcatccggtggcctcagggagccctgaagaaaccgaagcagaatgtaccagggacacatgcagaaaagtaaagaacaaggatatggaaaactaagcagtgatgaagacctcgaaataattgttgatcaaaagcagggaaaaggctctagggcggcagataaggctgttgccatggtgatgaaggagataccgagggaggagtctgctgaagaaaagcccctccttactatgacatcacagctggtgaatgagcaacaagaaagcagacccctcctgagtccctccatcgatgactttctctgtgaaaccaaatcggaagcaatagcaaggccagtaacatccaatacagctgtattgaccactggcttagatctcctcgacctgagtgaaccagtctctcaaacccaaaccaaagccaagaagtcagagccctcatcaaaaacctcatccctcaagaaaaaggccgatggatctgacctcatcagcacggatgctgagcagagaggccagcctctcagagtcccggagacttcatccttagatctagacattcaaacacaactggaaaaatgggacgatgttaagtttcatggagatcgaaataccaagggacatccaatggcagagagaaaatcatcctcatctagaactggatcaaaagagctcttatggtcctcagaacacagatctcaaccagaactgagtggtggaaaaagcgccctcaactctgagtcggcttcagaattggaattagtggctccgactcaggctcgactgaccaaagaacatcgctggggaagcgcattactttctagaaaccactccttagaagaagagtttgaaagggcaaaagcagcagtggagtcagatacagagttttgggataagatgcaagcagaatgggaagaaatggctcggaggaactggatatctgagaaccaagaagcccagaaccaagtaaccatctcggctagtgagaagggatattactttcacactgaaaaccccttcaaggactggcctggagcatttgaagaaggcttaaaaaggctgaaggaaggggatctgccagtcaccatcctgttcatggaagcagcaattcttcaggaccctggagatgcagaggcatggcagttcctcgggataacccaggcggagaatgaaaatgaacaagcagctattgtcgccctccagaggtgcttagaattacagcccaacaacttaaaagctttgatggccttggctgtgagttatactaacactggccatcagcaggatgcctgtgacgctctgaagaattggattaagcaaaatccaaagtacaaataccttgtgaaaagcaagaagggatctccaggcctcacccggcggatgtctaagtccccagttgatagctctgttctggaaggggtgaaggaattatatctggaagctgcccaccaaaatggagatatgatcgacccagacctgcagacaggtctaggggttctgttccacctgagtggagaatttaatagagcaatagatgcatttaacgctgccttaactgttcggccagaggactattcactatggaaccgcctcggggcgaccttggcgaacggagaccgcagcgaggaagccgtggaggcctatacgcgagcactggagattcagccaggattcatccggtccagatacaacctaggaataagctgcatcaacctgggcgcctacagagaagcggtcagcaattttctcactgccctcagtttgcaaagaaagagcaggaatcagcagcaagttcctcatcctgcaatctctgggaatatctgggctgccctcagaattgcgctctctctgatggaccaaccagaactcttccaggcggctaatcttggtgacctggatgtcctcttaagagctttcaacttggatccttgaagaaagaataataccagtactaataatcccaaaaaaaaaaa

SEQ ID NO: 222 - DNA, 551 bp, Homo sapiens
  CDS (179)..(427)
gggaattcccgggtcgacttcgctgtcgacgatttcgtagcaagagaaaaagcaagaacaagaggacaacttagccgagatcaccaacctcctgcgtggggacctgctctccgagaacccgcagcaggcagccagctccttggggccccaccgcgtggtccctgaccgctggaagggcatgacccaggagcagctggagcagatccgcctagtccagaagcagcaaatccaggagaagctgaggctccaggaagaaaagcgccagcgagacctggactgggaccggcggaggattcagggggctcgcgccaccctgctgtttgagcggcagcagtggcggcagcagcgcgacctgcgcagagctctggacagcagcaacctcagcctggccaaggagcagcatttgcagaaaaaatatatgaaatagtctcccgtgggttgatttgtatagacttcattcatataatttaatacaggaagtcgataatgaggaacacacccttgttcccgtcattcacgtataaagagtggctaccctcagaacaacgaca

SEQ ID NO: 223 - DNA, 2575 bp, Homo sapiens
  CDS (947)..(2239)
aagtcccgggtcgacgatttcgtccgctgctgccgccaccactgcgtcgggctggtgcagccccgggccaggccgcggccggggcaggagcgcaggggctttgttatgcacctaaagccatattggaagctccagaagaaagagcaccccccggaagtcagcagggaaacgcagagaactcctatgaaccaccaaaaggctgtaaatgatgaaacatgcaaagctagccacataacatcaagtgtctttccttcagcctctctcggtaaagcatcatctcgaaagccatttgggatcctttctccaaatgttctgtgcagtatgagtgggaagagtcctgtagagagcagcttgaatgttaaaaccaaaaagaatgcaccatctgcaacgatccaccagggcgaagaagaaggaccacttgatatctgggctgttgtgaaacctggaaataccaaggaaaaaattgcattctttgcatcccaccagtgtagtaacaggataggatctatgaaaataaaaagttcctgggatattgatgggagagctactaagagaaggaaaaaatcaggggatcttaaaaaagccaaggtacaggtggaaaggatgagggaggttaacagcaggtgctaccaacctgagccttttgcatgtggcattgagcactgttctgtgcactatgtgagtgacagtggggatggagtctatgctgggaggcctctgtcagttatacagatggttgccttcttggagcaaagagccagtgctctgctagctagctgttcaaaactgcacaaactcacctgcaattgtgaggttttctggccaatccagaggtgtgcctgcagtgtctgagtcctattctgccccaggagcttgtgaagaacccacagaaaggggaaatcttgaggttggtgaaccacagagcgaaccagtccgtgtccttgacatggtagccaagttggagtctgagtgcctgaagcggcagggccagcgtgagcctgggagcctctcaaggaataacagcttccgtcgaaatgtgggcagagtattgcttgcaaatagcactcaggctgatgaaggcaaaacaaagaaaggcgtcttggaggcacctgacactcaggtgaatcctgtggggtctgtatctgtggattgtggcccttcaagagctgatcgttgttctcctaaggaggaccaggcctgggacggtgcttctcaggactgccccccattgccagcaggagtgagtttccacatagacagtgcagagttagagccgggttcgcaaactgccgtgaaaaacagcaacagatatgatgtggaaatgacagatgaactcgttgggttacctttttcctctcatacctattcccaagcctctgaattgcccacagatgctgttgattgtatgagcagagagcttgtgtcccttactagccgaaatcctgatcaaagaaaagaatctttgtgcattagtatcactgtgtccaaggtagacaaagaccagccttccaatttaaactcctgtgaagacccagttccagggatgttgttttttttgccacctggtcagcacttgtcagactattcccagttgaatgaaagcacaacaaaagagtcttcagaggccagccagcttgaagatgctgctgggggtgacagtgcatctgaggaaaaaagtgggtctgctgagccatttgtactgccagcctcttctgtggaaagtacattaccagtgcttgaggcatccagttggaagaagcaggtgtcgcatgacttcctggagaccaggtttaaaatccagcagcttttggagcctcagcagtacatggcttttctgccccaccacattatggtaaaaatcttcaggttacttcccaccaagagtttagtggcccttaaatgtacctgctgctatttcaagtttatcattgagtactacaatatcaggccagcagattctcgctgggttcgagatccacgctatagagaggatccttgcaaacagtgcaagaaaaagtatgtgaaaggggatgtgtccctgtgccgatggcaccccaagccctattgccaggcattgccctatgggccagggtattggatgtgctgccaccggtctcagaaaggattccctggctgtaagctggggcttcatgacaatcactgggttcctgcctgccacagctttaatcgggcaatccataagaaagcaaaagggactgaagctgaagaggaatactaaagtccatctgagaggcaacaaaaggaccggtttctaaagctgcaaaacacctaaatacaccgttcaaatgagcgtagccccctgagtcatcactctaaaaaaatctgtacatcatcaggactgcattgctcaggcattttctaaactctaaatttacgagctgtacaaaaaaattggtcttgttgtttatagtggcatctcatgtttgaacccgggtggtatcccacagttggattcagttggctgtgaataactgcctgttttcctaaatcaaacccatcctcaaaggatgaagactcaccaccatccaggacattcagaagagttcactgcggg

SEQ ID NO: 224 - DNA, 835 bp, Homo sapiens
  CDS (72)..(650)
gaagatggtggcgcccagagcttcgctcttgctgctcccctgaggtgaactgaagccagcagccccgcatcatgtcaaagctcggccgggccgcccggggcctcaggaagcccgaggtcggcggtgtgatccgggcgatcgtgcgggcaggcctggccatgcccgggcccccactaggcccagtgctgggtcagagaggcgtttccatcaaccagttttgcaaggagttcaatgagaggacaaaggacatcaaggaaggcattcctctgcctaccaagattttagtgaagcctgacaggacatttgaaattaagattggacagcccactgtttcctacttcctgaaggcagcagctgggattgaaaagggggcccggcaaacagggaaagaggtggcaggcctggtgaccttgaagcatgtgtatgagattgcccgcatcaaagctcaggatgaggcatttgccctgcaggatgtacccctgtcgtctgttgtccgctccatcatcgggtctgcccgttctctgggcattcgcgtggtgaaggacctcagttcagaagagcttgcagctttccagaaggaacgagccatcttcctggctgctcagaaggaggcagatttggctgcccaagaagaagctgccaagaagtgacccttgccccaccaactcccagatttcaaaggaggtagttgcaaaagctgtgcccaaggggaggaaggaggtcacaccaatatgatgatggttttcatgactttgaatgatatatttttgtacatctagctgtatcgaggcatcaggcctgaataaacatcctttcttacccaaaaaaaaaaaaa

SEQ ID NO: 225 - DNA, 757 bp, Homo sapiens
  CDS (72)..(572)
gaagatggtggcgcccagagcttcgctcttgctgctcccctgaggtgaactgaagccagcagccccgcatcatgtcaaagctcggccgggccgcccggggcctcaggaagcccgagagaggcgtttccatcaaccagttttgcaaggagttcaatgagaggacaaaggacatcaaggaaggcattcctctgcctaccaagattttagtgaagcctgacaggacatttgaaattaagattggacagcccactgtttcctacttcctgaaggcagcagctgggattgaaaagggggcccggcaaacagggaaagaggtggcaggcctggtgaccttgaagcatgtgtatgagattgcccgcatcaaagctcaggatgaggcatttgccctgcaggatgtacccctgtcgtctgttgtccgctccatcatcgggtctgcccgttctctgggcattcgcgtggtgaaggacctcagttcagaagagcttgcagctttccagaaggaacgagccatcttcctggctgctcagaaggaggcagatttggctgcccaagaagaagctgccaagaagtgacccttgccccaccaactcccagatttcaaaggaggtagttgcaaaagctgtgcccaaggggaggaaggaggtcacaccaatatgatgatggttttcatgactttgaatgatatatttttgtacatctagctgtatcgaggcatcaggcctgaataaacatcctttcttacccaaaaaaaaaaaaa

SEQ ID NO: 226 - DNA, 1906 bp, Homo sapiens
  CDS (147)..(1151)
  misc_feature (1)...(1906): n = a,t,c or g
atttttgtttttaacagggggcacttacacatggtgatagaagggcaacagaatctagagatctgagcaggttcaactttgataataagtatggaagaaatgctttagaaattgtcataaaatccattgtaaacttggattctcctatggtatcaccacctccagactatcctggagaattttttaaagatgttcgacaaggactgataggcgttggcctgataaatgtagaagatcgctcgggaattcttactctcgataaagattataacaacataggaaaattcttaaatagaattttaggcatggaggtgcatcagcagaatgagttatttcagtattttgcggacacacttactgcagttgttcaaaatgccaaaaaaaatggaagatatgatatgggaatcttagatcttggttctggagatgaaaaagtgcggaaaagtgatgttaaaaagtttctgactccaggatattcaacctctggccacgtagaattatacacaattagtgtagagaggggaatgtcatgggaggaagctaccaagatttgggctgagctgacaggaccagacgatggcttttacttgtcattgcaaataaggaacaacaagaaaactgccatcttagttaaagaagtgaatcctaaaaagaaacttttcttagtttatcgaccaaatactgggaagcagctcaaattagaaatttatgctgatctaaaaaagaaatataagaaggtcgtctcagatgatgccctgatgcactggttagatcagtataattcatctgcagatacttgtactcatgcttattggcgcggcaattgcaaaaaagcaagcttggggctagtttgtgaaataggtcttcgtttccgtacatattatgtattatgtggttcagtgctgagtgtctggacaaaagttgagggtgttctagcatctgtcagtggcacaaacgtgaagatgcagatcgtgcggctaataacggaagatgggcaacggattgtaggtttgatcattccggcaaattgtgtgtctcctcttgtaaatctcctatcaacttcagaccagtctcaacagcttgcggtccaacagaaacagctatggcaacagcatcaccctcagagcatcaccaacttgagcaacgcatgaagaacagacaggtttcaacatggatggttctgaaatgctgttgaagcatatcatttgcataaaaatcagggacagtttccaaagaattatatatttttttcagttgtgctctctagttagtttttttgggagtaaggacaaacctggaataaatagcaaaactgaaaatcaacagtgctgatgggggtacatatgtctttcctttaacttctcccctgataactcccatctgcttttacttcgggtgagcanagggggatgtgtgtgtgcgtgtgtgtcaatctgtttgtgagtgtgttaaaggctacagaccacagttggtttaaaatgcttggaacttcccaaactggctttactttatgtttatacagtgctcagggttaacgcagtacatccatgccattgctgtgggaggtatccccggatgcatgtgttttgagtctataaatatagaaaatatatattggtttctttttccaacttaataggtttattaaagcatgaaatgaaaggttgcatatcatgcattcagggtattttctaatttttgttctgacagcgcatgtctttggaagcatgctggaacaagattaacacaggaggcgagtggcagagagaaacatttgttagatgtaccgcattggttattgcatttttatagtgggtatacctggggattgggttaaaccctgcagacccctccttacccttttccctgtcctggggttctgggcaagggaacgaacaccatactt

SEQ ID NO: 227 - DNA, 2058 bp, Homo sapiens
  CDS (582)..(1025)
ttgaaaatcgatcgccttgaggaaccgccccggaattcccgggtcgacccacgcggccggcccccagccccggctcagcccgcagcatgggcagccacaccacacgggacagcagctccctctcgggctgcacctcaggcatcctggaggagcgcagccctgccttccgggggccggacagggcccgggctgctgtctcaagacagccagacaaggagttctccttcatggatgaggaggaggaggatgaaatccgtgtgtgaggcggacagtgggtggccaccgggagctcttggctgcatcttctccctgcccccaccccactatgacctttgaccctacggcgcaggggcagccaggacccttgattcagaccatggaccctggaccttgtagatgagggacactggcctggccctcgggtcttcggaggacgtagggggctggcatgggtgccgactggctgcctgacttcatcacgctccctgcacttaggctgcgtgggacaagggctgtgttgtcacagcaggaataggttttcctctgttggcctccctttcctccaccctggcctcaaatggatgccagatgccaaccccagttctggccacgtacagccagcgggtcagcccagaggcagcctcagctccagggctaaggactctcggctcccattttctctgctggcgtttctgctgtgcccagcagtggctgctggggaagcagctgcagcaggagggagacggtcttgcctctcagcccctccctgccccaccccagctcctgccctggaaatctggagccccttggagctgagctggacggggggccagctgcgagcatgtgcactaaacgcagccctttccaggggaagagaacaggatggagaatggaaggaaagccccccaggcttcgtgaattgcaagaagggacccttccaggatgacactaggaacagggctagggcactcgctcagtccctaggggcttgtttgttctttattattgtgtttaaatccttatagagcaatatcaggatggtgttaataggtctgcctcagaatgagaatcaatccttttagaaaacctttatactaagcctcctcttcgaaattcacagtggcgattagcggactggagtctggtggcgattagcggactggagtctggggacatccgtggcaaagacaccagctcaactttagtgcttcccaactttatttagaatgacatggggtgggtgtctggtgtgtgtgttttccctacgcacctcccatagctattaacaactgaggaaggccagtgcagaatatttttggagaacgattttttttttaaataatatatcattcctatggggggaaagccttttttttttttttggctgagttattccctccctcccctcaataccctcagtactgactacttccctttcttttctcaggcctccccccaccgacttttgaggccagggttggccagatttagcaaaaccaaaacagagtgctgagttaaacgcaaatttcaggtaaacaaaagataattttctagcattaatatgccccacgcaatatttggaacacttatgtgaaaaatgatttgtttttctgaaatttacgtttctctctgagtcctgtaactgtccccgaggggattgagcagaagctcgggtatgagccctgaggttgactgccggttatttttctgtcctgggaacagcctgacccacctccctgtctccatgtagccagtggggggagggggagacacagaaccaaccacagccaggggcgtccccatggcgactgtggcccggcccctcctctcttgcctgactctcctctcttgcctgactctagacactaacttagttccaggttcggtgccctgttggtgctcctgtttccaatagcttaggtcccatggtgggggaggaacctcaggggctatgcagcccccgccagctgccctcaaatcccgtccaggccagttccagattctaaactgatttttttcatgatattgtcaaaacagtgaggaaacattaaaaaaaaa

SEQ ID NO: 228 - DNA, 1684 bp, Homo sapiens
  CDS (89)..(1684)
cagccggggcagcaagagcgagatctcattttggaatctatcaaacaagcaaaaaatcaaaacaaaaagctagcttgaattgaaagggatggagagaatcctgtttgaccctcaaaattctacagtcaggaaacaggctgatgaaactactcagctgccaacacatgctacccttcaggaaaaaggaaagacagctttgagggtattatacctgaagaaccttagccctcgggtgactgaaagagatcttgtgtcattgttcgctcggttccaggagaaaaaaggacctccaattcaattccgaatgatgactggacgaatgaggggccaggcttttatcacctttcccaataaggagatagcatggcaagcattgcatctagtaaatggatacaaactacatgggaaaatattggtgatagagtttggaaagaacaaaaagcaacggtcaaatctccaagcgacttctctcatatcatgtgctacagttctggaaactagaagtccaagatcaaggtgttggcaggttcagtgtctggtgaaggctattctccccttccaagatgatactttgttgctacatcctccagaggggaagaacgctgctcccttttatggcggagggaaaatgattaatcctagttgtcctggaggacttggagccactgtctgttggacttacttcacccataccagtatgtctgatgggggtggaattcaagtgccccctatgaccatctacactgaacaagatttatacaatcatgtcgtacctaagccccacaacaaaagagtacccattcttccttttgttatcagagcaggagtgctaggcagactaggtactggcattggcagtatcacaacctctactcagttctactacaaactatctcaagaaataaatggtgacatggaacaggtcactgactccctggtcaccttgcaagatcaacttaactccctagcagcagtagtccttcaaaatcgaagagctttagacttgctaaccgccaaaagagggggaacctgtttatttttaggagaagaatgctgttattatgttaatcaatccagaattgtcactgagaaagttaaagaaattcgagatcgaatacaatgtagagcagaggagcttcaaaacaccgaacactggggcctcctcagccaatggatgccctgggttctccccttcttaggacctctagcagctctaatattgttactcctctttggaccctgtatctttaacctccttgttaagtttgtctcttccagaattgaagctgtaaagctacaaatggttcttcaaatggagccccagatgcagtccatgactaaaatctaccacggacccctggaccagcctgctagcccttgttccgatgttaatgacatcaaaggcacccctcctgaggaaatctcaactgcacaacccctaccatgccccatttcagcaggaagcaggaaggaagagtatgtgtatgtggtcttactagcatttcctgagggtattattttgcaagccttaggaaataccagaaaaggaaagggagaaagtggagtacatggacatagctttcctcccttctggagtatggaacaagaagaagataccaggccctcaccagacaccaaatctgctggtatcttgatctcggcatcccagccgctaaacatgtga

SEQ ID NO: 229 - DNA, 962 bp, Homo sapiens
  CDS (220)..(894)
cggtcactctacctttccaaggagggacagtgccctagagcccatttgagaatttgatgccaaaggaaggggaaattttgattcactaccgtttagaggcccactggattggccagcccccaggttccggtggcttctaatgttttggggttgatgccgcacttaggggagtgatatttaccttgattggtatcattaactattgtggcattcaaaattatggatttaaaacatttagccagaagagaaaccctgatgcccttatcaatgaagctactaggcaagttgctttggcagatgccattctcattaataaaacagactttggttccagaagaagatgtaaagaaattaagagcgacaattagatccataaatggactaggacaaatcttagaaacacaaagatcaagagttgatctctctaatgtattagatcttcatgcctttgatagtctctctggaataagtttgcagaaaaaacttcagcatgtgccaggaacacaacctcaccttgatcagagtattgttacaatcacatttgaagtaccaggaaatgcaaaggaagaacatcttaatatgtttattcagaatctcctgtgggaaaagaatgtgagaaacaaggacaatcactgcatggaggtcataaggctgaagggattggtgtcaatcaaagacaaatcacaacaagtgattgtccagggtgtccatgagctctatgatctggaggagactccagtgagctggaaggatgacactgagagaacaaatcgattggtcctccttggcagaaatttagataaggatatccttaaacagctgtttatagctactgtgacagaaacagaaaagcagtggacaacacatttcaaagaagatcaagtttgtacataacactagaggcatttcttatcaaaaggattggataataaaaataagtttctactgggaaaaaaaaaaaa

SEQ ID NO: 230 - DNA, 718 bp, Homo sapiens
  CDS (118)..(657)
gggggtgggggcgggtggttgcctgcgggaggccgccgcgggtcatgtgaccggaagggctcctcacggacgccgtccctcctcggcgcggcctgagcgcccggcccgaccccggccatggggtgctgctacagcagcgagaacgaggactcggaccaggaccgagaggagcggaagctgctgctggaccctagcagcccccctaccaaagctctcaatggagccgagcccaactaccacagcctgccttccgctcgcactgatgagcaggccctgctctcttccatccttgccaagacagccagcaacatcattgatgtgtctgctgcagactcacagggcatggagcagcatgagtacatggaccgtgccaggcagtacagcacccgcttggctgtgctgagcagcagcctgacccattggaagaagctgccaccgctgccgtctcttaccagccagccccaccaagtgctggccagtgagcccatcccgttctctgatttgcagcaggtctccaggatagctgcttatgcctacagtgcactttctcagatccgtgtggacgcaaaagaggagctggttgtacagtttggggatcccatgaagaaaaggggccctgggaaagctcctcttcctctcctctcaccccatttttaacccaacccccttgggccccagcctctattgggggttttacaggtacctcaacccgaaggac

SEQ ID NO: 231 - DNA, 3280 bp, Homo sapiens
  CDS (1)..(2892)
atggacgccccaaaagcaggatacgcctttgagtaccttattgaaacattaaatgacagttcacataagaagttcttcgatgtatctaaacttggcaccaagtatgatgttctgccttactcaatacgggtcttgttggaagctgctgtacgaaattgtgatggctttttaatgaagaaggaagatgttatgaacattttagactggaaaaccaaacaaagcaatgttgaagtgccctttttccctgcccgtgttcttcttcaagattttactggaataccagcaatggtggattttgctgctatgagggaggcagtgaaaactcttggaggtgatcctgagaaagtccatcctgcttgtccgacagatcttacagttgaccattctttacaaattgacttcagtaaatgtgcaatacagaatgcaccaaatcctggaggtggtgacctgcagaaagcaggaaagctctctccacttaaagtgcagcctaagaagcttccctgcagaggccagactacctgccgaggatcttgtgattctggagaactaggccgaaactcaggaacattttcttcgcagattgagaatacacccatcctgtgtccttttcatttgcaaccagtgcctgaacctgaaacagtgttaaaaaatcaagaagtagaattcggcagaaatcgagagaggcttcagttttttaagtggagttcaagagttttaaagaatgtggcagtgatccctcctggaactggaatggctcatcaaataaacttagaatatttgtcaagagtggtttttgaagaaaaagacctcctcttcccagacagtgtagtcggcacagattcacacataacgatggtgaatggtttagggattctggggtggggggttggaggcattgaaacagaagcagttatgcttggtctgccagtttctcttactttaccagaggtggttggatgtgagttaactgggtcatcaaacccttttgttacatccatagatgttgttcttggtattacaaagcacctcaggcaagtaggagtggctggaaagtttgttgagttttttggaagtggagtttcacaattatctatagttgatcgaactacaatagcaaacatgtgtccggaatatggtgctatcctcagctttttccctgttgacaatgtgacattaaaacatttagaacatacaggttttagcaaagccaaactcgaatcaatggaaacataccttaaagctgtgaaattgtttcgaaatgaccagaattcttcaggagaacctgaatactcccaggtgatccagattaatctgaattcaatagttccatctgttagtggtccaaaaagacctcgggatagagttgctgtgacagatatgaaaagcgatttccaggcttgcttaaatgaaaaggttggatttaaaggcttccaaattgcagctgaaaaacaaaaggatattgtctccattcattatgaaggaagtgaatataagctgtctcatggatcagtggtcattgctgcagttatcagttgtaccaataattgcaatccatctgtcatgcttgctgcaggtcttttggctaaaaaggctgttgaagctggtctgcgtgttaaaccttatataagaacaagtttatctccaggcagtgggatggttacacattacctcagttcaagtggagtattaccatatctaagtaagcttggatttgaaatcgttggctatggatgttcaacttgtgtgggaaatacagcacccttatcagacgcagttttaaatgcagtaaaacagggtgatttggttacctgtggtaattttatctggaaaaaaaattttgaaggtcgtctttgtgattgtgttcgtgccaattatcttgcctctccacccttagtggtagcttatgccatagcaggcacagtgaatatagatttccagacagaacctttaggtactgaccccaccggcaagaacatttacctgcatgatatttggcctagtcgagaagaagttcatcgagtagaggaagaacatgttatactatccatgtttaaagcattaaaagataaaatagaaatggggaataaacggtggaattccttagaagcaccggattcagttttgtttccatgggacttaaagtctacttatatcagatgcccttcattttttgataaacttaccaaagagccaattgcactccaggctattgaaaatgcccatgtcttattatatttgggagactctgtcacaacagatcatatatcacctgcaggaagtatcgctaggaatagtgctgccgctaagtatttgacaaacagaggccttacccctcgtgaattcaactcttacggagctcgaagaggtaatgatgctgtaatgacaagaggcacttttgcaaatatcaagctttttaataagtttattggaaaaccagctcctaaaacaattcattttccatcaggacagacgctagatgtatttgaggctgcagagctgtaccagaaagaaggtatcccactgattattttagcaggaaagaaatatggttcaggaaactccagagactgggctgccaaaggaccgtatttactgggtgtgaaagctgttttggccgaaagttatgaaaaaatacacaaagatcatttgattggaattggcatagctccacttcagttccttccaggagaaaatgcagattccttgggcctctccggtagagaaacattttctttaacatttcctgaagaactgtctcctggaattacattgaatatacagacaagcactggaaaagtattcagcgtgattgcttcgtttgaagatgatgtggaaataacattatacaaacatggaggattattaaactttgtggcacgaaaattctcatagtatctacttaccatagatacctttcataactggtaactgcaaagccttttgtgctggacccaggaatccttaccatggagcagcagatagtcccagtatactcacttatctcatccatggatgtaaatgatgatgaatcaacatagtaactgaaatgaaatcttcttgattttaaataatatacgaatggtgctattaatattgctaaaatcaacgtgtgaagtgtgttgtggaagagacctgtaagtatgggggggggcgatattttatcagaccattttgtaaataaaggcagaatttgtgttgaagattcttatatgaataaccttcctggatttgtttagttttgcaccaataaaactgtgtactactgttaaaaaaaaaaaaa

SEQ ID NO: 232 - DNA, 475 bp, Homo sapiens
  CDS (39)..(461)
cggcacgaggtgttcactagcaacctcaaacagacaccatggtgcacctgactcctgaggagaagtctgccgttactgccctgtggggcaaggtgaacgtggatgaagttggtggtgaggccctgggcaggctgctggtggtctacccttggacccagaggttctttgagtcctttggggatctgtccactcctgatgctgttatgggcaaccctaaggtgaaggctcatggcaagaaagtgctcggtgcctttagtgatggcctggctcacctggacaacctcaagggcacctttgccacactgagtgagctgcactgtgacaagctgcacgtggatcctgagaacttcaggctcctggggcaacgtgctggtctgtgtgctgggcccatcactttgggcaaagaatttcaccccaccagtgcaggctgcctatcagaaagtggtgggtggtgtggctaatgccctggcccaaa

SEQ ID NO: 233 - DNA, 804 bp, Homo sapiens
  CDS (269)..(691)
attttctctggtgttttcactagttccggcctttggcgctctatgacgtcaccgaagtgacggagcggaaaagcgcgagaagcggcttggttccttgtacgcagaggcggtagtgacacaggcacaactgacagtggcagaagctcagctgacaaggactggggacggcggtgtccttgtcttgcctttgtcgcccccgcccctctcttccctggctggacttgcggagtccccgccgaagaacccgaggagccatatattgaagaccatgtctggaagcttctactttgtaattgttggtcaccatgataatccagtttttgaaatggagtttttgccagctgggaaggcagaatccaaagacgaccatcgtcatctgaaccagttcatagctcatgctgctctcgacctcgtagatgagaacatgtggctgtcgaacaacatgtacttgaaaactgtggacaagttcaacgagtggtttgtgtcagcatttgtcaccgcggggcatatgaggtttattatgcttcatgacataagacaagaagatggaataaagaacttctttactgatgtttatgatttatatataaaattttcaatgaatccattttatgaacccaattctcctattcgatcaagtgcatttgacagaaaagttcagtttcttgggaagaaacaccttttaagctgaatggagaaaattccaaaataaattatatcaccacaatggtgtatactcaggaatgtgtacattgtaaattacttgattaaatagcctggaaatcttttgtgtaaaaaaaaaaa

SEQ ID NO: 234 - DNA, 763 bp, Homo sapiens
  CDS (1)..(711)
atgaggctggcgggccaggttaggcagggccccggggactttgtgcaactgcctgtgcccgtcatccagcagctctaccactgggactgtggcctggcctgctccaggatggtgctgcggtacctgggccagctggacgacagtgagtttgagagagccctgcagaagctgcagctgaccaggagcatctggaccatcgacctggcctacctgatgcaccactttggcgtgaggcaccgcttctgtacccagaccctgggtgtcgacaagggctacaagaaccagtccttctacaggaagcactttgacacagaagagacccgggtgaatcagctgtttgcacaagcaaaggcctgcaaggtgctggtggagaaatgcacagtgagtgtgaaggacatccaggcgcacctggctcagggccatgtggccatcgtgctggtgaactcgggggtgctgcactgtgacctgtgctccagccctgtcaagtactgctgcttcacccccagtggccaccactgcttctgccgcactcctgactaccagggccacttcatcgtgctgcgtggctacaaccgggccactggctgcatcttctacaacaacccagcctatgccgaccgaatgtgcagcaccagcatcagtaactttgaggaggccagaaccagctatggcacagatgaggacatcctctttgtctacttggacagctgacagcaggagcctggtgcgcctaggtctgacggccgcgaatttagtagtagta

SEQ ID NO: 235 - DNA, 1195 bp, Homo sapiens
  CDS (270)..(866)
ccgggtcgacccacgcgtccggctgtgattctcactatactggtcctgaggaaagggcttctgtgaactgcggtttttagtttttattgtggttcttagttctcatgagacccctcttgaggatatgtgcctatctggtgcctctgctctccactagttgagtgaaaggaaggaggtaatttaccaccatgtttggttcctgtttataagatgttttaagaaagatttgaaacagattttctgaagaaagcagaagctctcttcccattatgacttcggaaatcacttatgctgaagtgaggttcaaaaatgaattcaagtcctcaggcatcaacacagcctcttctgcagttttctttcaaaaatattctcagcttcttgaaaaaaagactacaaaagagctggttcatacaacattggagtgtgtgaaaaaaaatatgcccgtggaagagacagcctggagctgttgcccaaagaattggaagtcatttagttccaactgctactttatttctactgaatcagcatcttggcaagacagtgagaaggactgtgctagaatggaggctcacctgctggtgataaacactcaagaagagcaggatttcatcttccagaatctgcaagaagaatctgcttattttgtggggctctcagatccagaaggtcagcgacattggcaatgggttgatcagacaccatacaatgaaagttccacattctggcatccacgtgagcccagtgatcccaatgagcgctgcgttgtgctaaattttcgtaaatcacccaaaagatggggctggaatgatgttaattgtcttggtcctcaaaggtcagtttgtgagatgatgaagatccacttatgaactgaacattctccatgaacaggtggttggattggtatctgtcattgtagggatagataataagctcttcttattcatgtgtaagggaggtccatagaatttaggtggtctgtcaactattctacttatgagagaattggtctgtacattgactgattcactttttcataaagtgagcatttattgagcattttttcatgtgccagagcctgtactggaggcccccattgtgcacacatggagagaacatgagtctctcttaatttttatctggttgctaaagaattatttaccaataaaattatatgatgtggtgtcaaaaaaaaaaa

SEQ ID NO: 236 - DNA, 1097 bp, Homo sapiens
  CDS (406)..(966)
tgccaaagcgtagtacccaaccctcaaattgtttcgtaatgggatgatgatgaagagagaatacaggggtcagcgatcagtgaaagcattggcagattacatcaggcaacaaaaaagtgaccccattcaagaaattcgggacttagcagaaatcaccactcttgatcgcagcaaaagaaatatcattggatattttgagcaaaaggactcggacaactatagagtttttgaacgagtagcgaatattttgcatgatgactgtgcctttctttctgcatttggggatgtttcaaaaccggaaagatatagtggcgacaacataatctacaaaccaccagggcattctgctccggatatagtggcgacaacataatctacaaaccaccagggcattctgctccggatatggtgtacttgggagctatgacaaattttgatgtgacttacaattggattcaagataaatgtgttcctcttgtccgagaaataacatttgaaaatggagaggaattgacagaagaaggactgccttttctcatactctttcacatgaaagaagatacagaaagtttagaaatattccagaatgaagtagctcggcaattaataagtgaaaaaggtacaataaactttttacatgccgattgtgacaaatttagacatcctcttctgcacatacagaaaactccagcagattgtcctgtaatcgctattgacagctttaggcatatgtatgtgtttggagacttcaaagatgtattaattcctggaaaactcaagcaattcgtatttgacttacattctggaaaactgcacagagaattccatcatggacctgacccaactgatacagccccaggagagcaagcccaagatgtagcaagcagtccacctgagagctccttccagaaactagcacccagtgaatataggtatactctattgagggatcgagatgagctttaaaaacttgaaaaacagtttgtaagcctttcaacagcagcatcaacctacgtggtggaaatagtaaacctatattttcataattctatgtgtatttttattttgaataaacagaaagaaatttaaaaaaaaaa

SEQ ID NO: 237 - DNA, 4435 bp, Homo sapiens
  CDS (248)..(3943)
gcacgaggcactcacctgtgtgtgatctgacccatgtgtggcggagcctgtgtgtgtgtgtgaggcagtgcttagtgtgctcctggggatgagcgcatgcgtgtgaggtggctgaggctgggtcccctgtccgcgtgcgtgccggtgtgcaccgtgtctgtgtgtgcacacccagtactgacaggcttcctttctgattcccccagggtcttacaggagaggggaccgtcctgggctggcctggaccatggtgctgctctgggagcctgcaggagcctggcttgctctgggcctggccctggccctgggccccagcgtggccgcagctgcccctcggcaggactgcacgggcgtggagtgcccgccgctggagacctgcattgaggaggcgctggagccgggtgcctgctgtgccacgtgtgtgcagcagggctgcgcctgcgagggctaccagtactatgactgcctacagggtggcttcgtgcgcggccgcgtgcccgccggtcagtcctattttgtggacttcgggagcactgagtgctcctgcccaccaggcggcggcaagatcagctgccagttcatgctgtgcccggagctgccgcccaactgcatcgaggctgtagtggtggctgacagctgcccacagtgcggccaggtgggctgcgtccacgcgggccacgagtacgccgctggccacactgttcacctgccgccctgccgggcctgccactgccctgacgccggtggagagctcatctgctaccagctccccggttgccacgggaacttctcagatgccgaggagggtgaccccgagcgacactacgaagacccctacagctatgaccaggaggtggccgaggtggaagcagcaacagccctggggggtgaggtccaggcgggtgcagtccaggcaggcgcagggggccccccagctgctctgggaggtgggagtcagccactgtccaccatccaggcacccccctggccagctgtcctccccaggcccacagcggctgctgccctgggtcccccagccccagtgcaggccaaagctaggagagtgaccgaggacagtgaggaggaagaagaggaggaggaggagagagaggaaatggctgtcactgagcagctggcagcaggtggccacagggggctggatgggctgcccactacagccccagctggacccagtcttcctatccaggaggagagggcagaagctggggcaagggcagaagctggggcaaggcctgaagagaacctcatcctggatgcccaagccacgtcccgcagcactgggccggagggcgtgacgcatgcaccgagcctgggcaaggctgctctcgtcccaactcaggccgtgcctggctctcccagggacccagtcaagcccagcccccacaacatcctgtccacatcactgcctgatgcagcctggatcccacccacccgagaagtgcccaggaagccgcaagttctgccccattcccacgtggaggaggacacagaccccaactctgtccattctatccccagaagtagccctgaaggctccaccaaggacctgatcgagacttgctgcgcagccggacagcagtgggccattgacaatgacgagtgcctggagatccctgagagtggcactgaggacaacgtctgcaggacagcccagaggcactgctgtgtctcctacttgcaggagaagagctgcatggccggcgtcctgggagccaaggagggtgagacctgtggggctgaggacaacgacagctgcggcatctccctgtacaagcaatgctgtgactgctgtggcctgggcctccgcgtgcgggccgagggccagtcgtgtgagtccaatcctaacctgggctatccctgcaatcatgtcatgctctcctgctgtgagggtgaagagcctctcatagtacctgaggttcgccgacctccagagcccgcagctgcaccacggagagtttcagaggcagagatggcgggccgagaggccctgtcactgggcacagaggccgagctgccgaacagcctgccgggcgatgaccaggatgagtgccttctcctcccgggagagctgtgccagcacctttgcatcaatactgtgggttcttaccactgtgcctgctttcctggcttctcactgcaggacgatggccgcacttgccgcccagagggtcaccctccacagccggaagccccacaggagcctgcactgaagtcagaattttcccaggtggcctctaacaccatcccgctgccactgccgcagcccaatacctgcaaagacaatggaccctgcaagcaggtgtgcagcactgttgggggctcagccatatgctcctgttttcccggctatgccatcatggcggatggcgtgtcctgtgaagaccaagacgagtgcctgatgggtgctcacgattgtagccggcgacagttctgtgtgaacaccctgggatccttctactgtgtcaaccacacagtgctctgtgccgatggctatatcctcaatgcgcacaggaagtgcgtggacatcaacgagtgtgtgacggacctgcacacgtgcagccggggcgagcactgtgtgaacacactgggctccttccactgctacaaggcactcacctgtgagccaggctatgccctcaaggatggcgagtgcgaagacgtggatgagtgtgcgatgggcacgcacacctgccagccgggcttcttgtgccagaacaccaagggctccttctactgccaggccaggcagcgctgcatggatggcttcctgcaggatcctgaaggcaactgtgtggacatcaacgagtgcacgtcactgtccgagccatgtcggccaggcttcagctgcatcaacacggtgggctcctacacgtgccagaggaacccgctgatctgcgcgcgcggctaccacgccagcgatgatggggccaagtgtgtggacgtgaatgagtgtgagacaggtgtgcaccgctgcggtgagggccaagtgtgccacaacctccctggctcctaccgctgtgactgcaaagccggctttcagcgggatgccttcggccggggctgcatcgacgtgaatgagtgctgggcctcgccaggccgcctgtgccagcacacgtgtgagaacacactcggctcctaccgctgttcctgcgcctccgggttcctgctagcagcggacggcaagcgctgtgaagacgtgaatgagtgtgaggcccagcgctgcagccaggagtgtgccaacatctatggctcctaccagtgctactgccgccagggctaccagctggctgaggatgggcacacctgcacagacatcgacgagtgtgctcaaggcgccggcatcctctgcaccttccgctgtctcaacgtgccagggagctaccagtgtgcatgccctgagcagggctacaccatgacggccaacgggaggtcctgcaaggacgtggatgagtgtgcactgggcacccacaactgttccgaggctgagacctgccacaacatccagggtagcttccgctgcctgcgcttcgagtgtcctcccaactatgtccaagtctccaaaacgaagtgcgagcgcaccacgtgccatgacttcctggagtgccagaactcgccagcgcgcatcacgcactaccagctcaacttccagacgggcctcctggtgcctgcgcatatcttccgcattggccccgcgccagccttcacgggggacaccatcgccctgaacatcatcaagggcaatgaggagggctactttggcacgcgcaggctcaatgcctacacgggtgtggtctacctgcagcgggccgtgctggagccccgggactttgccctggacgtggagatgaagctctggaggcagggctccgtcaccaccttcctggccaagatgcacatcttcttcaccacctttgccctgtgaggtgccagcacgggccacctgcgggtgtggcacctcacagggctcacactgcgtgggagggactgggtcactattgtggtttttactataactttgtaaattaacttaattttgctgacttgactcctgtggcttctggacccctcctctgccccgcaggaggaagttccacggcaggtggtgcgttcccacgcaggcaccaagtggaagcttgcacggtgggccacggccgtggcgggtgccctgtgggtgaggctgggtgatgacctgaggaccagagacacgcgaccatgttggggctcttggactcctctggatgacccgtccccaaagttgacattccatttcatgttccactgtgattaattcttttcttttttaaaaaatcattttaaagttttttgtttaactataaagtagtacatgtacattatataaaaaaaagttcaactagtatgaaagggttataaagtaacagaggaaaaaaaaaaa

SEQ ID NO: 238 - DNA, 882 bp, Homo sapiens
  CDS (109)..(882)
taagcttgcggccgcctcagagaatgaagatctagaaaacaaggatacctctttattggcttctgccaccgatccagaaccctgctcctcaccccacagaggccacagatggtatctccagtgagtaaggatgccacggaagatctgcggaaagcaactggtcctttggaggctcaggccttggtgaaacaggatttgctgcctgcagaccaggcccaggtcctcaatgagatggctaagtatcaagttccacagaggtctggggacatcgttatgatccagtctgaacatacaggagctatagatgttctttcagctgatttggaatctgcagatcttctgggggaccacaggaaagtctccccacctctgatggctcctccatgcatctggacctttgccaaggtgaaggaattcaaaagcaagctgggcaaagagaagaacagccgtctggtggtgaagcgtggtgaggtggtgaccatccgggtacctactcatccagaggggaagcgtgtctgctgggagtttgcgaccgatgactatgacattggctttggagtttattttgactggacccctgtaactagcactgacataactgtgcaggtcagtgattccagtgacgatgaggatgaagaagaggaagaggaggaagagattgaagaacccgttccagctggagatgtggagagaggctccaggagctccttgcggggtcgctatggggaggtcatgcctgtgtaccggcgggacagccaccgagacgtgcaggctggcagccatgactaccctggtgagggcatctacctgctcaagttcgacaactcctactccctgctgcgcaacaagactctctacttccacatctactacaccagctga

SEQ ID NO: 239 - DNA, 946 bp, Homo sapiens
  CDS (73)..(810)
cacaaaaagacccagagctgttttcttagggtgcatcctttgtttttctggttttggtcttttcatcacaggatggcattagctctgtgtctgcaggtgctgtgcagcctgtgtggctggctctcgctctatatttctttctgccacctgaataagcaccgaagctatgagtggagctgccgcctggtcaccttcacccatggagtcctctctataggcctctccgcttatattggcttcattgatggcccatggccttttacccacccaggctcacccaatacacctctccaagttcatgtcctgtgtctcaccttgggctacttcatcttcgacttgggctggtgcgtctactttcagtctgagggtgccttgatgctggctcatcacacattgagtatcttgggcattatcatggcccttgtgcttggggagtctggcacagaggtcaatgcagtcctctttggaagtgagcttaccaaccccttgctacagatgcgctggtttctccgggaaacagggcactatcacagtttcactggagatgtagtggacttcctctttgtggctctgttcacaggagtgaggattggtgtgggagcttgcctccttttctgtgaaatggtctcccccacgcctaagtggtttgtgaaggctgggggagtagcgatgtatgctgtgtcttggtgtttcatgtttagcatctggcgctttgcatggaggaagagcatcaagaagtaccatgcttggagaagcaggcggagtgaggaacggcagctgaaacacaacggacatctcaaaatacactagccaaggcttgctccagattatggattgggttaagtcagccatgggaaccaggttggaaatatgactgttacataattacacttataacaaacttaggtttcaataaagggctaaatgtattgatcaaaaaaaaaaa

SEQ ID NO: 240 - DNA, 346 bp, Homo sapiens
  CDS (63)..(323)
ccgctctggaccgtctcaaggtgtttgacggcatcccaccgccctacgacaagaaaaagcggatggtggttcctgctgccctcaaggtcgtgcgtctgaagcctacaagaaagtttgcctatctggggcgcctggctcacgaggttggctggaagtaccaggcagtgacagccaccctggaggagaagaggaaagagaaagccaagatccactaccggaagaagaaacagctcatgaggctacggaaacaggccgagaagaacgtggagaagaaaattgacaaatacacagaggtcctcaagacccacggactcctggtctgagcccaataaagactgttaattcc

SEQ ID NO: 241 - DNA, 2410 bp, Homo sapiens
  CDS (100)..(1776)
gtactgctccggaattcccgggtcgacgatttcgtccggcctctaggggaggcccgagccgtcgggcgccccgtccccgcgtctagttgttcatgaagcatgtcggccaccagcgtggacacccagagaacaaaaggacaagataataaagtacaaaatggttcgttacatcagaaggatacagttcatgacaatgactttgagccctaccttactggacaggcaaatcagagtaacagttacccctcaatgagcgacccctacctgtccagctattacccgccgtccattggatttccttactccctcaatgaggctccgtggtctactgcaggggaccctccgattccatacctcaccacctacggacagctcagtaacggagaccatcattttatgcacgatgctgtttttgggcagcctgggggcctggggaacaacatctatcagcacaggttcaattttttccctgaaaaccctgcgttctcagcatgggggacaagtgggtctcaaggtcagcagacccagagctccgcgtatgggagcagctacacctaccccccgagctccctgggtggcacggtggttgatgggcagccaggctttcacagcgacaccctcagcaaggcccccgggatgaacagcctggagcagggcatggttggcctgaagattggggacgtcagctcctccgccgtcaagacggtgggctctgtcgtcagcagcgtggcactgactggtgtcctttctggcaacggtgggacaaatgtgaacatgccagtttcaaagccgacctcgtgggctgccattgccagcaagcctgcaaaaccacagcctaaaatgaaaacaaagagcgggcctgtcatggggggtgggctgccccctccacccataaagcataacatggacattggcacctgggataacaaggggcctgtgccgaaggccagtcccccagcaggcaccctctccacaggctgccccacagccccagcaggtggctcagctctcccagcacagcccccagctttggctcaaccgcagtatcagagccctcagcagccaccccagacccgctgggttgccccacgcaacagaaacgcggcgtttgggcagagcggaggggctggcagcgatacgaactctcctggaaacgtccagcctaattctgcccccagcgtcgaatcccaccccgtccttgaaaaactgaaggctgctcacagctacaacccgaaagagtttgagtggaatctgaaaagcgggcgtgtgttcatcatcaagagctactctgaggacgacatccaccgctccattaagtactccatctggtgtagcacagagcacggcaacaagcgcctggacagcgccttccgctgcatgagcagcaaggggcccgtctacctgctcttcagcgtcaatgggagtgggcatttttgtggggtggccgagatgaagtcccccgtggactacggcaccagtgccggggtctggtctcaggacaagtggaaggggaagtttgatgtccagtggatttttgttaaggatgtacccaataaccagctccggcacatcaggctggagaataacgacaacaaaccggtcacaaactcccgggacacccaggaggtgcccttagaaaaagccaagcaagtgctgaaaattatcagttcctacaagcacacaacctccatcttcgacgactttgctcactacgagaagcgccaggaggaggaggaggtggtgcgcaaggaacggcagagtcgaaacaaacaatgagggcgaaccagtttcttacatgttctaacgtttgactttgaaaacagtttaaaacacgtgtgcttggtcagctccagtgtgtcgtcccgtgcgggggttgagtgttgcatctttgcctttcttgtcgttgatttttgcccagatggatctgcatttatttgtactttttctatgtattataatcctgtagaagtcactaataaaggagtattttttttgtcagcttatcaatcagactgatctaatgtgaaatgtaagtatccttaaaaacaaagcatctattttggcagaaattgtgttcttaaattcagtcatttgatattctgtgagacttcatatttctcatccctttattgctttttagcaaacataagaaaccatgagtcattttgtcatttagagtattctgataaaatctcttgaaaatactgaaatcaaaaggttaatgattttttgttcattctgatttgtcattttattatctgttatcggtctaaagtgctaatttacccatttgatttttctgctagacagataacttttaatttttcaaatttggcagacacttttttttttttttggaaaatttttctttcaaaatgggtggcccatggaaaacccaccggcccttatg

SEQ ID NO: 242 - DNA, 1198 bp, Homo sapiens
  CDS (182)..(1198)
gcagtgtgctggaattgatggacgtagtcggcacaatgaggaccaggcttgctgtgaagtggtgtatgtggaaggtcggaggagtgttacaggagtacctagggagcctagccgaggccagggactctgcttctactactggggcctatttgatgggcatgcagggggcggagctgctgaaatggcctcacggctcctgcatcgccatatccgagagcagctaaaggacctggtagagatacttcaggacccttcgccaccacccctctgcctcccaaccactccggggaccccagattcctccgatccctctcacttgcttggccctcagtcctgctggtcttcacagaaggaagtgagccacgagagcctggtagtgggggccattgagaatgccttccagctcatggatgagcagatggcccgggagcggcgtggccaccaagtggaggggggctgctgtgcactggttgtgatctacctgctaggcaaggtgtacgtggccaatgcaggcgatagcagggccatcattgtccggaatggtgaaatcattccaatgtcccgggagtttaccccggagactgagcgccagcgtcttcagctgcttggcttcctgaaaccagagctgctaggcagtgaattcacccaccttgagttcccccgcagagttctgcccaaggagctggggcagaggatgttgtaccgggaccagaacatgaccggctgggcctacaaaaagatcgagctggaggatctcaggtttcctctggtctgtggggagggcaaaaaggctcgggtgatggccaccattggggtgacccgaggcttgggagaccacagccttaaggtctgcagttccaccctgcccatcaagccctttctctcctgcttccctgaggtacgagtgtatgacctgacacaatatgagcactgcccagatgatgtgctagtcctgggaacagatggcctgtgggatgtcactactgactgtgaggtagctgccactgtggacagggtgctgtcggcctatgagcctaatgaccacagcaggtatacagctctggcccaagctctggtcctgggggcccggggtaccccccgagaccgtggctggcgtctccccaacaacaagctgggttccggggatgacatctctgtcttcgtcatccccctgggagggccaggcagttactcctga

SEQ ID NO: 243 - DNA, 2286 bp, Homo sapiens
  CDS (72)..(1715)
gcagcatctcctgtgaacacagaggagcacctgtttgctgttaaaatcgatctccctcggcaccctgagcaatggatataatatttggcaggaataggaaagaacagctggagcctgtgagggccaaagtgacaggcaagattccagcatggctgcagggaaccctgctccgcaatgggcctgggatgcacacagttggggagtccagatacaaccattggttcgacggccttgccctgctccacagcttcaccatcagagacggtgaagtctattacaggagcaaatacctgagaagcgatacctacaacaccaatattgaggcaaacaggattgtggtgtctgagtttggaacaatggcctatccggacccctgcaaaaacatattttccaaagctttctcctacttgtctcacaccatccccgatttcacagacaactgcctgatcaacatcatgaagtgcggagaagacttctacgcgacctcagagaccaattacatcaggaaaatcaacccacagactctggaaaccctggagaaggttgattatcgtaaatacgtggcggtaaatctggcaacgtcacatccccattatgatgaggctggaaatgttctaaacatgggcacatccattgtggaaaaggggaagacaaagtatgtgatttttaagatccctgccacagtaccagagggcaagaagcaggggaagagcccctggaagcacacagaggtgttctgctccatcccatcccgctccctgctctccccaagctactaccacagctttggagtcaccgagaactatgtcatcttccttgagcagcctttcaggttggatattctcaagatggcaaccgcatacatccggagaatgagctgggcctcctgcctggctttccacagggaggagaagacttatatccacatcatcgaccaaaggaccaggcagcctgtgcagaccaagttttacacagacgccatggtggtcttccatcacgtcaacgcctacgaagaggacggctgcatcgtgtttgacgtcattgcctacgaggacaacagcctctaccagctcttctacctggccaacctgaaccaggacttcaaggagaactccaggctcacctcggtccccaccctcaggaggtttgccgtgcccctccacgtggacaagaatgcagaagtgggcacaaatttaatcaaagtggcatctacaacagccacggccctgaaggaagaagatggccaagtctactgccagccggaatttctttatgaaggcttagagcttccacgggtcaattatgctcacaatggaaagcaataccgatatgtctttgctacaggagttcagtggagtccaatcccaaccaagataataaaatatgacattctcacaaagtcatccttaaaatggagagaggacgactgctggccagcggaacccctgtttgtgcccgcgccaggtgccaaggatgaggatgacggagtaatcttatcagccattgtctctactgatccccaaaagctgccttttctgctcattctggatgccaaaagctttacggaattggcccgtgcctctgttgatgtcgatatgcacatggatctccatggattattcattacagacatggactgggacacaaaaaagcaggccgcttctgaggaacagcgggacagggcttccgactgccacggggctcctctgacctgatggtgttggggtttgggtaggggaggggagctcggctgtcagaactccatggatatgtttctttggatggaggggagggcctttgttaccttttgcacttattctttctgtgggtgctttgacaagggcatggcaagagagcttgtcagtatcatttctttcattttattttggctgcaaaaattttgtttgaaagtcaaacatttgaacatcaaatatgtattgattagatccagtccttctaagaaacctcctttcctttaacaaaaagaccttgaccatgaatcagagattgtattcaatgacattatcatcatttttagaacgagccactaacctattagagaagaggcagataattatttatcattgtgccttcctctgtctctttctctttcctttgctccctcccatgtttctggtggactaaattgtgtatctgggagttctcactttctagccaggcctgatgagttaagttacatgaccaggaaggttatgccactttgtggtcattccatgcaagtcatggcgtaatataaaataataaaaactttaaaaaaaaaaaaaa

SEQ ID NO: 244 - DNA, 886 bp, Homo sapiens
  CDS (28)..(735)
aggaggcagaactctgggtgtctcaccatggcctggatccctctacttctccccctcctcactctctgcacaggctctgaggcctcctatgagctgacacagccaccctcggtgtcagtgtccccaggacagacggccaggatcacctgctctggagatgcattgccaaagcaatatgcttattggtaccagcagaagccaggccaggcccctgtgctggtgatatataaagacagtgagaggccctcagggatccctgagcgattctctggctccagctcagggacaacagtcacgttgaccatcagtggagtccaggcagaagacgaggctgactattactgtcaatcagcagacagcagtggtacttatccagggtatgtcttcggaactgggaccaaggtcaccgtcctaggtcagcccaaggccaaccccactgtcactctgttccagccctcctctgaggagctccaagccaacaaggccacactagtgtgtctgatcagtgacttctacccgggagctgtgacagtggcctggaaggcagatggcagccccgtcaaggcgggagtggagaccaccaaaccctccaaacagagcaacaacaagtacgcggccagcagctacctgagcctgacgcccgagcagtggaagtcccacagaagctacagctgccaggtcacgcatgaagggagcaccgtggagaagacagtggcccctacagaatgttcataggttcccaactctaaccccacccacgggagcctggagctgcaggatcccaggggaggggtctctctccccatcccaagtcatccagcccttctccctgcactcatgaaaccccaataaatatcctcattgacaaccagaaaaaaaaaaaaaa

SEQ ID NO: 245 - DNA, 1943 bp, Homo sapiens
  CDS (111)..(1943)
tgcggttcctctaggaaaattcctttgtgcagatcaggcccgtggattgggatctgtgaacaagaggaacctcagcagccaggacaggcaggagcagtggaatagctactatggcttctggaatcctggttaatgtaaaggaggaggtgacctgccccatctgcctggaactcctgacacaacccctgagcctggactgcggccacagcttctgccaagcatgcctcactgcaaaccacaagaagtccatgctagacaaaggagagagtagctgccctgtgtgccggatcagttaccagcctgagaacatacggcctaatcggcatgtagccaacatagtggagaagctcagggaggtcaagttgagcccagaggggcagaaagttgatcattgtgcacgccatggagagaaacttctactcttctgtcaggaggacgggaaggtcatttgctggctttgtgagcggtctcaggagcaccgtggtcaccacacgttcctcacagaggaggttgcccgggagtaccaagtgaagctccaggcagctctggagatgctgaggcagaagcagcaggaagctgaagagttggaagctgacatcagagaagagaaagcttcctggaagactcaaatacagtatgacaaaaccaacgtcttggcagattttgagcaactgagagacatcctggactgggaggagagcaatgagctgcaaaacctggagaaggaggaggaagacattctgaaaagccttacgaactctgaaactgagatggtgcagcagacccagtccctgagggagctcatctcagatctggagcatcggctgcaggggtcagtgatggagctgcttcaggctcagggagaagggttcaagtgcatcagtgatgtgaaggagatgaaaccagtgatgtgggagggatggacacaggatgagagatgtgggggtcaaaaaatttttttcatccctaggagtgagatctggaggctgaaaaagccaaaaatggtttccaagaaactgaagactgtattccatgctccagatctgagtaggatgctgcaaatgtttagaggtgaggagaagcagacaaagactgtggatgtgggattgttgtggtgtcaggctgtggttgttagtggaggctatggtaaggctttgctggggatgtcaggcaggatgttccttgtgaccctggggagcacgtgtgagtaccagtggtggtgccaggggccaggcatgctagtcttcgaacacctgggcagcatacatgggagctggtggtggcagatgtgggtaagtgttcttgatgagggtgggctttatgttcatattctgggccacccttctttcttcattctccaaggaattcctggcatggaggacaaacacagatggatatctatccccttctcctccatgtatttcattatggtgcttgggaactgcaccatcctcctcaccatctccacagagcgctccctgcacaaacccatgttcctgctcctctgtctgttggccctcacagacctgggcatgtctacaaccaccattcccaaggtgctgtgcattttctggtttggccagagtgagatcagctatgaaggatgcctggttcagctgttcttcatccactccatctctgccatgcagtcagctgtcctgatgaccatggcctttgaccactatgtggccatctgcaagcccttgcgctatgccaccatcctttccaatagttgcactggactcattggcttagtgagtttggtgagagctatcctctttattctccccatgcccatcctccttcagcaaatgccctatcatgccaatcgtgtcatccccaccacctcctgtgagcacatggctgtggtgaagatggtttgtgtagatactacagtcaacaggatatatggcctggtggtggccttgttggttgctggctag

SEQ ID NO: 246 - protein, 375 aa, Homo sapiens
MDRSLRNVLVVSFGFLLLFTAYGGLQSLQSSLYSEEGLGVTALSTLYGGMLLSSMFLPPLLIERLGCKGTIILSMCGYVAFSVGNFFASWYTLIPTSILLGLGAAPLWSAQCTYLTITGNTHAEKAGKRGKDMVNQYFGIFFLIFQSSGVWGNLISSLVFGQTPSQETLPEEQLTSCGASDCLMATTTTNSTQRPSQQLVYTLLGIYTGSGVLAVLMIAAFLQPIRDVQRESEGEKKSVPFWSTLLSTFKLYRDKRLCLLILLPLYSGLQQGFLSSEYTRSYVTCTLGIQFVGYVMICFSATDALCSVLYGKVSQYTGRAVLYVLGAVTHVSCMIALLLWRPRADHLAVVFVFSGLWGVADAAADTKQCSLRRSV

SEQ ID NO: 247 - protein, 737 aa, Homo sapiens [sequence omitted]

SEQ ID NO: 248 - protein, 768 aa, Homo sapiens
MNGDSRAAVVTSPPPTTAPHKERYFDRVDENNPEYLRERNMAPDLRQDFNMMEQKKRVSMILQSPAFCEELESMIQEQFKKGKNPTGLLALQQIADFMTTNVPNVYPAAPQGGMAALNMSLGMVTPVNDLRGSDSIAYDKGEKLLRCKLAAFYRLADLFGWSQLIYNHITTRVNSEQEHFLIVPFGLLYSEVTASSLVKINLQGDIVDRGSTNLGVNQAGFTLHSAIYAARPDVKCVVHIHTPAGAAVSAMKCGLLPISPEALSLGEVAYHDYHGILVDEEEKVLIQKNLGPKSKVLILRNHGLVSVGESVEEAFYYIHNLVVACEIQVRTLASAGGPDNLVLLNPEKYKAKSRSPGSPVGEGTGSPPKWQIGEQEFEALMRMLDNLGYRTGYPYRYPALREKSKKYSDVEVPASVTGYSFASDGDSGTCSPLRHSFQKQQREKTRWLNSGRGDEASEEWQNGSSPKSKTKVWTNITHDHVKPLLQSLSSGVCVPSCITNCLWTKEDGHRTSTSAVPNLFVPLNTNPKEVQEMRNKIREQNLQDIKTAGPQSQVLCGVVMDRSLVQGELVTASKAIIEKEYQPHVIVSTTGPNPFTTLTDRELEEYRREVERKQKGSEENLDEAREQKEKSPPDQPAVPHPPPSTPIKLEEDLVPEPTTGDDSDAATFKPTLPDLSPDEPSEALGFPMLEKEEEAHRPPSPTEAPTEASPEPAPDPAPVAEEAAPSAVEEGAAADPGSDGSPGKSPSKKKKKFRTPSFLKKSKKKSDS

SEQ ID NO: 249 - protein, 407 aa, Homo sapiens [sequence omitted]

SEQ ID NO: 250 - protein, 260 aa, Homo sapiens
MAKEWGYASHNGPDHWHELFPNAKGENQSPVELHTKDIRHDPSLQPWSVSYDGGSAKTILNNGKTCRVVFDDTYDRSMLRGGPLPGPYRLRQFHLHWGSSDDHGSEHTVDGVKYAAELHLVHWNPKYNTFKEALKQRDGIAVIGIFLKIGHENGEFQIFLDALDKIKTKGKEAPFTKFDPSCLFPACRDYWTYQGSFTTPPCEECIVWLLLKEPMTVSSDQMAKLRSLLSSAENEPPVPLVSNWRPPQPINNRVVRASFK

SEQ ID NO: 251 - protein, 267 aa, Homo sapiens
MSGCFPVSGLRCLSRDGRMAAQGAPRFLLTFDFDETIVDENSDDSIVRAAPGQRLPESLRATYREGFYNEYMQRVFKYLGEQGVRPRDLSAIYEAIPLSPGMSDLLQFVAKQGACFEVILISDANTFGVESSLRAAGHHSLFRRILSNPSGPDARGLLALRPFHTHSCARCPANMCKHKVLSDYLRERAHDGVHFERLFYVGDGANDFCPMGLLAGGDVAFPRRGYPMHRLIQEAQKAEPSSFRASVVPWETAADVRLHLQQVLKSC

SEQ ID NO: 252 - protein, 384 aa, Homo sapiens
MEGLGRSCLWLRRELSPPRPRLLLLDCRSRELYESARIGGALSVALPALLLRRLRRGSLSVRALLPGPPLQPPPPAPVLLYDQGGGRRRRGEAEAEAEEWEAESVLGTLLQKLREEGYLAYYLQGGFSRFQAECPHLCETSLAGRAGSSMAPVPGPVPVVGLGSLCLGSDCSDAESEADRDSMSCGLDSEGATPPPVGLRASFPVQILPNLYLGSARDSANLESLAKLGIRYILNVTPNLPNFFEKNGDFHYKQIPISDHWSQNLSRFFPEAIEFIDEALSQNCGVLVHCLAGVSRSVTVTVAYLMQKLHLSLNDAYDLVKRKKSNISPNFNFMGQLLDFERSLRLEERHSQEQGSGGQASAASNPPSFFTTPTSDGAFELAPT

SEQ ID NO: 253 - protein, 206 aa, Homo sapiens
MRRTGAPAQADSRGRGRARGGCPGGEATLSQPPPRGGTRGQEPQMKETIMNQEKLAKLQAQVRIGGKGTARRKKKVVHRTATADDKKLQFSLKKLGVNNISGIEEVNMFTNQGTVIHFNNPKVQASLAANTFTITGHAETKQLTEMLPSILNQLGADSLTSLRRLAEALPKQSVDGKAPLATGEDDDDEVPDLVENFDEASKNEAN

SEQ ID NO: 254 - protein, 102 aa, Homo sapiens
MLYLKKGSASALPRFLVTNLQTNLSWHRPLPYIGSLSPGPPLPPPCCHHCPGPRHPGLPESARASKKAPLSLETGGHTSLSESPAGLKGQWIVIVEIVWLRL

SEQ ID NO: 255 - protein, 182 aa, Homo sapiens
MELGELLYNKSEYIETASGNKVSRQSVLCGSQNIVLNGKTIVMNDCIIRGDLANVRVGRHCVVKSRSVIRPPFKKFSKGVAFFPLHIGDHVFIEEDCVVNAAQIGSYVHVGKNCVIGRRCVLKDCCKILDNTVLPPETVVPPFTVFSGCPGLFSGELPECTQELMIDVTKSYYQKFLPLTQV

SEQ ID NO: 256 - protein, 1347 aa, Homo sapiens
MLGLGFRGSAVLGVCWQLRSPPSRAARMMNRTTPDQELAPASEPVWERPWSMEEIRRSSQSWSLAADAGLLQFLQEFSQQTISRTHEIKKQVDGLIRETKATDCRLHNVFNDFLMLSNTQFIENRVYDEEVEEPVLKAEAEKTEQEKTREQKEVDLIPKVQEAVNYGLQVLDSAFEQLDIKAGNSDSEEDDANGRVELILEPKDLYIDRPLPYLIGSKLFMEQEDVGLGELSSEEGSVGSDRGSIVDTEEEKEEEESDEDFAHHSDNEQNQHTTQMSDEEEDDDGCDLFADSEKEEEDIEDIEENTRPKRSRPTSFADELAARIKGDAMGRVDEEPTTLPSGEAKPRKTLKEKKERRTPSDDEEDNLFAPPKLTDEDFSPFGSGGGLFSGGKGLFDDEDEESDLFTEAPQDRQAGASVKEESSSSKPGKKIPAGAVSVFLGDTDVFGAASVPSMKEPQKPEQPTPRKSPYGPPPTGLFDDDDGDDDDDFFSAPHSKPSKTGKVQSTADIFGDEEGDLFKEKAVASPEATVSQTDENKARAEKKVTLSSSKNLKPSSETKTQKGLFSDEEDSEDLFSSQSASNLKGASLLPGKLPTSVSLFDDEDEEDNLFGGTAAKKQTLSLQAQREEKAKASELSKKKASALLFSSDEEDQWNIPASQTHLASDSRSKGEPRDSGTLQSQEAKAVKKTSLFEEDEEDDLFAIAKDSQKKTQRVSLLFEDDVDSGGSLFGSPPTSVPPATKKKETVSEAPPLLFSDEEEKEAQLGVKSVDKKVESAKESLKFGRTDVAESEKEGLLTRSAQETVKHSDLFSSSSPWDKGTKPRTKTVLSLFDEEEDKMEDQNIIQAPQKEVGKGCDPDAHPKSTGVFQDEELLFSHKLQKDNDPDVDLFAGTKKTKLLEPSVGSLFGDDEDDDLFSSAKSQPLVQEKKRVVKKDHSVNSFKNQKHPESIQGSKEKGIWKPETPQANLAINPAALLPTAASQISEVKPVLPELAFPSSEHRRSHGLESVPVLPGSGEAGVSFDLPAQADTLHSANKSRVKMRGKRRPQTRAARRLAAQESSEAEDMSIPRGPIAQWADGAISPNGHRPQLRAASGEDSTEEALAAAAAPWEGGPVPGVDTSPFAKSLGHSRGEADLFDSGDIFSTGTGSQSVERTKPKAKIAENPANPPVGGKAKSPMFPALGEASSDDDLFQSAKPKPAKKTNPFPLLEDEDDLFTDQKVKKNETKSSSQQDVILTTQDIFEDDIFATEAIKPSQKTREKEKTLESNLFDDNIDIFADLTVKPKEKSKKKVEAKSIFDDDMDDIFSSGIQAKTTKPKSRSAQAAPEPRFEHKVSNIFDDPLNAFGGQ

SEQ ID NO: 257 - protein, 1368 aa, Homo sapiens
MLGLGFRGSAVLGVCWQLRSPPSRAARMMNRTTPDQELAPASEPVWERPWSMEEIRRSSQSWSLAADAGLLQFLQEFSQQTISRTHEIKKQVDGLIRETKATDCRLHNVFNDFLMLSNTQFIENRVYDEEVEEPVLKAEAEKTEQEKTREQKEVDLIPKVQEAVNYGLQVLDSAFEQLDIKAGNSDSEEDDANGRVELILEPKDLYIDRPLPYLIGSKLFMEQEDVGLGELSSEEGSVGSDRGSIVDTEEEKEEEESDEDFAHHSDNEQNQHTTQMSDEEEDDDGCDLFADSEKEEEDIEDIEENTRPKRSRPTSFADELAARIKGDAMGRVDEEPTTLPSGEAKPRKTLKEKKERRTPSDDEEDNLFAPPKLTDEDFSPFGSGGGLFSGGKGLFDDEDEESDLFTEAPQDRQAGASVKEESSSSKPGKKIPAGAVSVFLGDTDVFGAASVPSMKEPQKPEQPTPRKSPYGPPPTGLFDDDDGDDDDDFFSAPHSKPSKTGKVQSTADIFGDEEGDLFKEKAVASPEATVSQTDENKARAEKKVTLSSSKNLKPSSETKTQKGLFSDEEDSEDLFSSQSASNLKGASLLPGKLPTSVSLFDDEDEEDNLFGGTAAKKQTLSLQAQREEKAKASELSKKKASALLFSSDEEDQWNIPASQTHLASDSRSKGEPRDSGTLQSQEAKAVKKTSLFEEDEEDDLFAIAKDSQKKTQRVSLLFEDDVDSGGSLFGSPPTSVPPATKKKETVSEAPPLLFSDEEEKEAQLGVKSVDKKVESAKESLKFGRTDVAESEKEGLLTRSAQETVKHSDLFSSSSPWDKGTKPRTKTVLSLFDEEEDKMEDQNIIQAPQKEVGKGCDPDAHPKSTGVFQDEELLFSHKLQKDNDPDVDLFAGTKKTKLLEPSVGSLFGDDEDDDLFSSAKSQPLVQEKKRVVKKDHSVNSFKNQKHPESIQGSKEKGIWKPETPQDSSGLAPFKTKEPSTRIGKIQANLAINPAALLPTAASQISEVKPVLPELAFPSSEHRRSHGLESVPVLPGSGEAGVSFDLPAQADTLHSANKSRVKMRGKRRPQTRAARRLAAQESSEAEDMSIPRGPIAQWADGAISPNGHRPQLRAASGEDSTEEALAAAAAPWEGGPVPGVDTSPFAKSLGHSRGEADLFDSGDIFSTGTGSQSVERTKPKAKIAENPANPPVGGKAKSPMFPALGEASSDDDLFQSAKPKPAKKTNPFPLLEDEDDLFTDQKVKKNETKSSSQQDVILTTQDIFEDDIFATEAIKPSQKTREKEKTLESNLFDDNIDIFADLTVKPKEKSKKKVEAKSIFDDDMDDIFSSGIQAKTTKPKSRSAQAAPEPRFEHKVSNIFDDPLNAFGGQ

SEQ ID NO: 258 - protein, 129 aa, Homo sapiens
MSISRAVLGEKEGGLGSVAPCQPALREDRVSHARMAGHVSVLVSHFPPSVTYLGIPQGLLECDCPLPSCLGYKSWPYVPAVRGSGNPTQPPVLGWSVSIHPLVVIEAALPVLGEDIWATRAPLAPSRRK

SEQ ID NO: 259 - protein, 154 aa, Homo sapiens
MHPEPLLNSTQSAPHHFPDSFQATPFCFNQSLIPGSPSNSSILSGSLDYSYSPVQLPSYAPENYNSPASLDTRTCGYPPEDHSYQHLSSHAQYSCFSSATTSICCCASCEAEDLDALQAAEYFYPSTDCVDFAPSAAATSDFYKRETNCDICYS

SEQ ID NO: 260 - protein, 249 aa, Homo sapiens
MPGQRIASLAYSLLPYGAGIPAPLTRPRLPRRPPRLPPPRSLRLFRIQVRRPFKGSSCRLRGPGTLVPDSGDPDGFRADPRGQGGRLWRYPEADSGEDCRPELAEFEKLSDQVKISEEALRADGFGDNPFYHCLVAEILPAPGKLLGPCVVGYGIYYFIYSTWKGRTIYLEDIYVMPEYRGQGIGSKIIKKVAEVALDKGCSQFRLAVLDWNQRAMDLYKALGAQDLTEAEGWHFFCFQGEATRKLAGK

SEQ ID NO: 261 - protein, 167 aa, Homo sapiens
MKCVFVTVGTTSFDDLIACVSAPDSLQKIESLGYNRLILQIGRGTVVPEPFSTESFTLDVYRYKDSLKEDIQKADLVISHAGKGAGSCLETLEKGKPLVVVINEKLMNNHQLELAKQLHKEGHLFYCTCSTLPGLLQSMDLSTLKCYPPGQPEKFSAFLDKVVGLQK

SEQ ID NO: 262 - protein, 442 aa, Homo sapiens
MASVVLPSGSQCAAAAAAAAPPGLRLRLLLLLFSAAALIPTGDGQNLFTKDVTVIEGEVATISCQVNKSDDSVIQLLNPNRQTIYFRDFRPLKDSRFQLLNFSSSELKVSLTNVSISDEGRYFCQLYTDPPQESYTTITVLVPPRNLMIDIQKDTAVEGEEIEVNCTAMASKPATTIRWFKGNTELKGKSEVEEWSDMYTVTSQLMLKVHKEDDGVPVICQVEHPAVTGNLQTQRYLEVQYKPQVHIQMTYPLQGLTREGDALELTCEAIGKPQPVMVTWVRVDDEMPQHAVLSGPNLFINNLNKTDNGTYRCEASNIVGKAHSDYMLYVYDPPTTIPPPTTTTTTTTTTTTTILTIITDSRAGEEGSIRAVDHAVIGGVVAVVVFAMLCLLIILGRYFARHKGTYFTHEAKGADDAADADTAIINAEGGQNNSEEKKEYFI

SEQ ID NO: 263 - protein, 62 aa, Homo sapiens
MDPNCSCAAAGVSCTCASSCKCKECKCTSCKKSCCSCCPVGCAKCAQGCICKGASEKCSCCA

SEQ ID NO: 264 - protein, 640 aa, Homo sapiens
MESVVRRCPFLSRVPQAFLQKAGKSLLFYAQNCPKMMEVGAKPAPRALSTAAVHYQQIKETPPASEKDKTAKAKVQQTPDGSQQSPDGTQLPSGHPLPATSQGTASKCPFLAAQMNQRGSSVFCKASLELQEDVQEMNAVRKEVAETSAGPSVVSVKTDGGDPSGLLKNFQDIMQKQRPERVSHLLQDNLPKSVSTFQYDRFFEKKIDEKKNDHTYRVFKTVNRRAHIFPMADDYSDSLITKKQVSVWCSNDYLGMSRHPRVCGAVMDTLKQHGAGAGGTRNISGTSKFHVDLERELADLHGKDAALLFSSCFVANDSTLFTLAKMMPGCEIYSDSGNHASMIQGIRNSRVPKYIFRHNDVSHLRELLQRSDPSVPKIVAFETVHSMDGAVCPLEELCDVAHEFGAITFVDEVHAVGLYGARGGGIGDRDGVMPKMDIISGTLGKAFGCVGGYIASTSSLIDTVRSYAAGFIFTTSLPPMLLAGALESVRILKSAEGRVLRRQHQRNVKLMRQMLMDAGLPVVHCPSHIIPVRVADAAKNTEVCDELMSRHNIYVQAINYPTVPRGEELLRIAPTPHHTPQMMNYFLENLLVTWKQVGLELKPHSSAECNFCRRPLHFEVMSEREKSYFSGLSKLVSAQA

SEQ ID NO: 265 - protein, 228 aa, Homo sapiens
MMPEINTNHLDKQQVQLLAEMCILIDENDNKIGAETKKNCHLNENIEKGLLHRAFSVFLFNTENKLLLQQRSDAKITFPGCFTNTCCSHPLSNPAELEESDALGVRRAAQRRLKAELGIPLEEVPPEEINYLTRIHYKAQSDGIWGEHEIDYILLVRKNVTLNPDPNEIKSYCYVSKEELKELLKKAASGEIKITPWFKIIAATFLFKWWDNLNHLNQFVDHEKIYRM

SEQ ID NO: 266 - protein, 490 aa, Homo sapiens
MTSRASELSPGRSVTAGIIIVGDEILKGHTQDTNTFFLCRTLRSLGVQVCRVSVVPDEVATIAAEVTSFSNRFTHVLTAGGIGPTHDDVTFEAVAQAFGDELKPHPKLEAATKALGGEGWEKLSLVPSSARLHYGTDPCTGQPFRFPLVSVRNVYLFPGIPELLRRVLEGMKGLFQNPAVQFHSKELYVAADEASIAPILAEAQAHFGRRLGLGSYPDWGSNYYQVKLTLDSEEEGPLEECLAYLTARLPQGSLVPYMPNAVEQASEAVYKLAESGSSLGKKVAGALQTIETSLAQYSLTQLCVGFNGGKDCTALLHLFHAAVQRKLPDVPNPLQILYIRSISPFPELEQFLQDTIKRYNLQMLEAEGSMKQALGELQARHPQLEAVLMGTRRTDPYSCSLCPFSPTDPGWPAFMRINPLLDWTYRDIWDFLRQLFVPYCILYDRGYTSLGSRENTVRNPALKCLSPGGHPTYRPAYLLENEEEERNSRT

SEQ ID NO: 267 - protein, 137 aa, Homo sapiens
MRPQQAPVSGKVFIQRDYSSGTRCQFQTKFPAELENRIDRQQFEETVRTLNNLYAEAEKLGGQSYLEGCLACLTAYTIFLCMETHYEKVLKKVSKYIQEQNEKIYAPQGLLLTDPIERGLRVIEITIYEDRGMSSGR

SEQ ID NO: 268 - protein, 71 aa, Homo sapiens
MEMHFIMCLSKPRLSYNDDVLTKDAGECVICLEELLQGDTIARLPCLCIYHKSCIDSWFEVNRSCPEHPAD

SEQ ID NO: 269 - protein, 382 aa, Homo sapiens
MTEFWLISAPGEKTCQQTWEKLHAATSKNNNLAVTSKFNIPDLKVGTLDVLVGLSDELAKLDAFVEGVVKKVAQYMADVLEDSKDKVQENLLANGVDLVTYITRFQWDMAKYPIKQSLKNISEIIAKGVTQIDNDLKSRASAYNNLKGNLQNLERKNAGSLLTRSLAEIVKKDDFVLDSEYLVTLLVVVPKLNHNDWIKQYETLAEMVVPRSSNVLSEDQDSYLCNVTLFRKAVDDFRHKARENKFIVRDFQYNEEEMKADKEEMNRLSTDKKKQFGPLVRWLKVNFSEAFIAWIHVKALRVFVESVLRYGLPVNFQAMLLQPNKKTLKKLREVLHELYKHLDSSAAAIIDAPMDIPGLNLSQQEYYPYVYYKIDCNLLEFK

SEQ ID NO: 270 - protein, 196 aa, Homo sapiens
MSHGHSHGGGGCRCAAEREEPPEQRGLAYGLYLRIDLERLQCLNESREGSGRGVFKPWEERTDRSRFTGNVKLKGIIIMGEDDDSHPSEMRLYKNIPQMSFDDTEREPDQTFSLNRDLTGELEYATKISRFSNVYHLSIHISKNFGADTTKVFYIGLRGEWTELRRHEVTICNYEASANPADHRVHQVTPQTHFIS

SEQ ID NO: 271 - protein, 339 aa, Homo sapiens
MAVAQQLRAESDFEQLPDDVAISANIADIEEKRGFTSHFVFVIEVKTKGGSKYLIYRRYRQFHALQSKLEERFGPDSKSSALACTLPTLPAKVYVGVKQEIAEMRIPALNAYMKSLLSLPVWVLMDEDVRIFFYQSPYDSEQVPQALRRLRPRTRKVKSVSPQGNSVDRMAAPRAEALFDFTGNSKLELNFKAGDVIFLLSRINKDWLEGTVRGATGIFPLSFVKILKDFPEEDDPTNWLRCYYYEDTISTIKDIAVEEDLSSTPLLKDLLELTRREFQREDIALNYRDAEGDLVRLLSDEDVALMVRQARGLPSQKRLFPWKLHITQKDNYRVYNTMP

SEQ ID NO: 272 - protein, 326 aa, Homo sapiens
MAVAQQLRAESDFEQLPDDVAISANIADIEEKRGFTSHFVFVIEVKTKGGSKYLIYRRYRQFHALQSKLEERFGPDSKSSALACTLPTLPAKVYVGVKQEIAEMRIPALNAYMKSLLSLPVWVLMDEDVRIFFYQSPYDSEQVPQALRRLRPRTRKVKSVSPQGNSVDRMAAPRAEALFDFTGNSKLELNFKAGDVIFLLSRINKDWLEGTVRGATGIFPLSFVKILKDFPEEDDPTNWLRCYYYEDTISTPLLKDLLELTRREFQREDIALNYRDAEGDLVRLLSDEDVALMVRQARGLPSQKRLFPWKLHITQKDNYRVYNTMP

SEQ ID NO: 273 - protein, 85 aa, Homo sapiens
MGDRILPFLAAVWLCQLAFCTDPLTTVREQCEQLEKCVKARERLELCDERVSSRSHTEEDCTEELFDFLHARDHCVAHKLFNNLK

SEQ ID NO: 274 - protein, 91 aa, Homo sapiens
MRSLLSVGLPPIPIGRGCHFTLITVFLYCTRVGRKGTCVAPPDLPVSASTFGTSCLRQEAAAEGRPVVRFDKIKAAGKWTVRFREMEGSWI

SEQ ID NO: 275 - protein, 290 aa, Homo sapiens
MGSSKKVTLSVLSREQSEGVGARVRRSIGRPELKNLDPFLLFDEFKGGRPGGFPDHPHRGFETVSYLLEGGSMAHEDFCGHTGKMNPGDLQWMTAGRGILHAEMPCSEEPAHGLQLWVNLRSSEKMVEPQYQELKSEEIPKPSKDGVTVAVISGEALGIKSKVYTRTPTLYLDFKLDPGAKHSQPIPKGWTSFIYTISGDVYIGPDDAQQKIEPHHTAVLGEGDSVQVENKDPKRSHFVLIAGEPLREPVIQHGPFVMNTNEEISQAILDFRNAKNGFERAKTWKSKIGN

SEQ ID NO: 276 - protein, 637 aa, Homo sapiens
MAKEGRYECICGWAFVKDVHEDSITVAFENNWQPDRQIPFHDVRFPPPVGYNKDINESDEVEFYVIEYAACDATYNEIVTIERLRSVNPNKPATKDTFHKIKLDVPEDLRQMCAKEAAHKDFKKAVGAFSVTYDPENYQLVILSINEVTSKRAHMLIDMHFRSLRTKLSLIMRNEEASKQLESSRQLASRFHEQFIVREDLMGLAIGTHGANIQQARKVPGVTAIDLDEDTCTFHIYGEDQDAVKKARSFLEFAEDVIQVPRNLVGKVIGKNGKLIQEIVDKSGVVRVRIEAENEKNVPQEEEIMPPNSLPSNNSRVGPNAPEEKKHLDIKENSTHFSQPNSTKVQRVLVASSVVAGESQKPELKAWQGMVPFVFVGTKDSIANATVLLDYHLNYLKEVDQLRLERLQIDEQLRQIGASSRPPPNRTDKEKSYVTDDGQGMGRGSRPYRNRGHGRRGPGYTSGTNSEASNASETESDHRDELSDWSLAPTEEERESFLRRGDGRRRGGGGRGQGGRGRGGGFKDSVVGLNRGCGNKELPVSISESVTVEPFENILIGNDDHSRTDNRPRNPREAKGRTTDGSLQIRVDCNNERSVHTKTLQNTSSEGSRLRTGKDRNQKKEKPDSVDGQQPLVNGVP

SEQ ID NO: 277 - protein, 616 aa, Homo sapiens
MAKEGRYECICGWAFVKDVHEDSITVAFENNWQPDRQIPFHDVRFPPPVGYNKDINESDEVEFYVIEYAACDATYNEIVTIERLRSVNPNKPATKDTFHKIKLDVPEDLRQMCAKEAAHKDFKKAVGAFSVTYDPENYQLVILSINEVTSKRAHMLIDMHFRSLRTKLSLIMRNEEASKQLESSRQLASRFHEQFIVREDLMGLAIGTHGANIQQARKVPGVTAIDLDEDTCTFHIYGEDQDAVKKARSFLEFAEDVIQVPRNLVGKVIGKNGKLIQEIVDKSGVVRVRIEAENEKNVPQEEEIMPPNSLPSNNSRVGPNAPEEKKHLDIKENSTHFSQPNSTKVQRGMVPFVFVGTKDSIANATVLLDYHLNYLKEVDQLRLERLQIDEQLRQIGASSRPPPNRTDKEKSYVTDDGQGMGRGSRPYRNRGHGRRGPGYTSGTNSEASNASETESDHRDELSDWSLAPTEEERESFLRRGDGRRRGGGGRGQGGRGRGGGFKDSVVGLNRGCGNKELPVSISESVTVEPFENILIGNDDHSRTDNRPRNPREAKGRTTDGSLQIRVDCNNERSVHTKTLQNTSSEGSRLRTGKDRNQKKEKPDSVDGQQPLVNGVP

SEQ ID NO: 278 - protein, 429 aa, Homo sapiens
MAVAVGRPSNEELRNLSLSGHVGFDSLPDQLVNKSTSQGFCFNILCVGETGIGKSTLMDTLFNTKFESDPATHNEPGVRLKARSYELQESNVRLKLTIVDTVGFGDQINKDDSYKPIVEYIDAQFEAYLQEELKIKRSLFNYHDTRIHACLYFIAPTGHSLKSLDLVTMKKLDSKVNIIPIIAKADTIAKNELHKFKSKIMSELVSNGVQIYQFPTDEETVAEINATMSVHLPFAVVGSTEEVKIGNKMAKARQYPWGVVQVENENHCDFVKLREMLIRVNMEDLREQTHTRHYELYRRCKLEEMGFKDTDPDSKPFSLQETYEAKRNEFLGELQKKEEEMRQMFVMRVKEKEAELKEAEKELHEKFDLLKRTHQEKKKKVEDKKKELEEEVNNFQKKKAAAQLLQSQAQQSGAQQTKKDKDKKNFFFM

SEQ ID NO: 279 - protein, 133 aa, Homo sapiens
MKVPQSGGDSLVEKSQKATAPNKPPALSNTEKRNHSAFWGPESQIIPVMPDSSSSGKNRKEESYIFESKGDGGGGEHPAPETGAVLPLALGLAITALLLLMVACRLRLVKQKLKKARPITSEESDYLINGMYL

SEQ ID NO: 280 - protein, 458 aa, Homo sapiens [sequence omitted]

SEQ ID NO: 281 - protein, 328 aa, Homo sapiens [sequence omitted]

SEQ ID NO: 282 - protein, 233 aa, Homo sapiens
MEDLTRSDRTGIPGTTISSAELSASPLSPAPGLPRHSRLHALLGLAMPVDLSKWSGPLSLQEVDEQPQHPLHVTYAGAAVDELGKVLTPTQVKNRPTSISWDGLDSGKLYTLVLTDPDAPSRKDPKYREWHHFLVVNMKGNDISSGTVLSDYVGSGPPKGTGLHRYVWLVYEQDRPLKCDEPILSNRSGDHRGKFKVASFRKKYELRAPVAGTCYQAEWDDYVPKLYEQLSGK

SEQ ID NO: 283 - protein, 376 aa, Homo sapiens
MESYDIIANQPVVIDNGSGVIKAGFAGDQIPKYCFPNYVGRPKHMRVMAGALEGDLFIGPKAEEHRGLLTIRYPMEHGVVRDWNDMERIWQYVYSKDQLQTFSEEHPVLLTEAPLNPSKNREKAAEVFFETFNVPALFISMQAVLSLYATGRTTGVVLDSGDGVTHAVPIYEGFAMPHSIMRVDIAGRDVSRYLRLLLRKEGVDFHTSAEFEVVRTIKERACYLSINPQKDEALETEKVQYTLPDGSTLDVGPARFRAPELLFQPDLVGDESEGLHEVVAFAIHKSDMDLRRTLFANIVLSGGSTLFKGFGDRLLSEVKKLAPKDIKIKISAPQERLYSTWIGGSILASLDTFKKMWVSKKEYEEDGSRAIHRKTF

SEQ ID NO: 284 - protein, 485 aa, Homo sapiens
MTQSVVVQVGQCGNQIGCCFWDLALREHAAVNQKGIYDEAISSFFRNVDTRVVGDGGSISKGKICSLKARAVLIDMEEGVVNEILQGPLRDVFDTKQLITDISGSGNNWAVGHKVFGSLYQDQILEKFRKSAEHCDCLQCFFIIHSMGGGTGSGLGTFLLKVLEDEFPEVYRFVTSIYPSGEDDVITSPYNSILAMKELNEHADCVLPIDNQSLFDIISKIDLMVNSGKLGTTVKPKSLVTSSSGALKKQHKKPFDAMNNIVANLLLNLTSSARFEGSLNMDLNEISMNLVPFPQLHYLVSSLTPLYTLTDVNIPPRRLDQMFSDAFSKDHQLLRADPKHSLYLACALMVRGNVQISDLRRNIERLKPSLQFVSWNQEGWKTSLCSVPPVGHSHSLLALANNTCVKPTFMELKERFMRLYKKKAHLHHYLQVEGMEESCFTEAVSSLSALIQEYDQLDATKKHACAGFTQTKHSYVKKKPSKILS

SEQ ID NO: 285 - protein, 572 aa, Homo sapiens
MAAPRPSPAISVSVSAPAFYAPQKKFGPVVAPKPKVNPFRPGDSEPPPAPGAQRAQMGRVGEIPPPPPEDFPLPPPPLAGDGDDAEGALGGAFPPPPPPIEESFPPAPLEEEIFPSPPPPPEEEGGPEAPIPPPPQPREKVSSIDLEIDSLSSLLDDMTKNDPFKARVSSGYVPPPVATPFSSKSSTKPAAGGTAPLPPWKSPSSSQPLPQVPAPAQSQTQFHVQPQPQPKPQVQLHVQSQTQPVSLANTQPRGPPASSPAPAPKFSPVTPKFTPVASKFSPGAPGGSGSQPNQKLGHPEALSAGTGSPQPPSFTYAQQREKPRVQEKQHPVPPPAQNQNQVRSPGAPGPLTLKEVEELEQLTQQLMQDMEHPQRQNVAVNELCGRCHQPLARAQPAVRALGQLFHIACFTCHQCAQQLQGQQFYSLEGAPYCEGCYTDTLEKCNTCGEPITDRMLRATGKAYHPHCFTCVVCARPLEGTSFIVDQANRPHCVPDYHKQYAPRCSVCSEPIMPEPGRDETVRVVALDKNFHMKCYKCEDCGKPLSIEADDNGCFPLDGHVLCRKCHTARAQT

SEQ ID NO: 286 - protein, 307 aa, Homo sapiens
MASVLSYESLVHAVAGAVGSVTAMTVFFPLDTARLRLQVDEKRKSKTTHMVLLEIIKEEGLLAPYRGWFPVISSLCCSNFVYFYTFNSLKALWVKGQHSTTGKDLVVGFVAGVVNVLLTTPLWVVNTRLKLQGAKFRNEDIVPTNYKGIIDAFHQIIRDEGISALWNGTFPSLLLVFNPAIQFMFYEGLKRQLLKKRMKLSSLDVFIIGAVAKAIATTVTYPLQTVQSILRFGRHRLNPENRTLGSLRNILYLLHQRVRRFGIMGLYKGLEAKLLQTVLTAALMFLVYEKLTAATFTVMGLKRAHQH

SEQ ID NO: 287 - protein, 938 aa, Homo sapiens
MTSFFSESPQPIGSLGHDADLRRQQQDTCNSGIADIHRLFNWLSETLANARHSDASLTDTVNKALGLSTDDAYEELRQKHEYELNSTPDKKDYEQPTCAKVENAQFKGTQSLLLEVDATSKYSVAISTSEVGTDHKLHLKEDPNLISVNNFEDCSLCPSVPIEHGFRRQQSKSNNVEETEIHWKLIPITGGNARSPEDQLGKHGEKQTPGMKSPEEQLVCVPPQEAFPNDPRVINRQRSSDYQFPSSPFTDTLKGTTEDDVLTGQVEEQCVPAAEAEPPAVSETTERTVLGEYNLFSRKIEEILKQKNVSYVSRVSTPIFSTQEKMKRLSEFIYSKTSKAGVQEFVDGLHEKLNTIIIKASAKGGNLPPVSPNDSGAKIASNPLERHVIPVSSSDFNNKHLLEPLCSDPLKDTNSDEQHSTSALTEVEMNQPQHATELMVTSDHIVPGDMAREPVEETTKSPSDVNISAQPALSNFISQLEPEVFNSLVKIMKDVQKNTVKFYIHEEEESVLCKEIKEYLIKLGNTECHPEQFLERRSKLDKLLIIIQNEDIAGFIHKIPGLVTLKKLPCVSFAGVDSLDDVKNHTYNELFVSGGFIVSDESILNPEVVTVENLKNFLTFLEELSTPEGKWQWKVHCKFQKKLKELGRLNAKALSLLTLLNVYQKKHLVEILSYHNCDSQTRNAPELDCLIRLQAQNIQQRHIVFLTEKNIKMLSSYTDNGIVVATAEDFMQNFKNLVGYHNSITEENLPQLGANENLESQSALLENDEKDEEDMSLDSGDEISHIEVCSNFHSEIWEKETKGSRGTDQKKNTQIELQSSPDVQNSLLEDKTYLDSEERTSIDIVCSEGENSNSTEQDSYSNFQVYHSQLNMSHQFSHFNVLTHQTFLGTPYALSSSQSQENENYFLSAYTESLDRDKSPPPLSWGKSDSSRPYSQEK

SEQ ID NO: 288 - protein, 135 aa, Homo sapiens
MAEVQVLVLDGRGHLLGRLAAIVAKQVLLGRKVVVVRCEGINISGNFYRNKLKYLAFLRKRMNTNPSRGPYHFRAPSRIFWRTVRGMLPHKTKRGQAALDRLKVFDGIPPPYDKPLSFSNRKSGWWFLLPSRSCV

SEQ ID NO: 289 - protein, 1939 aa, Homo sapiens
MPIEGIVTYHQSHHSGGILTYNCTQHTGEIVTLVCSSCQKLSVTLTHGQRLLKQLLSLKSAKIALCESLISGRERAEIVQKQTQTLIMLVADLQQKVYAQPRQVSTVRVSALIGKEWDPATWNGDVWEDPDEARGSEFVNSDEPFLEGPEDIPLTIALQNRFVKAAPESLKNLIIALLCMSDLTVGTPVTQLQNLNTVGIIGSHGYLWPFMRVIVHWGKGNDWTFWGLLNTGSELTLIPGDPKHHCGPPVKVEAYGGQETDGFWRMTVDYHEVNQVVTPIAAAVPDVVSLLEQITTSPDNYSPFERQLLAYYWALVKTELLTMGCQVTMRPELPIMNWVLSDPSNHKGLKGRGLKHYPIRDAGLGTSNQAGSWRGQVGFRDVVGPLSLAAAGGQGLVLTAVCPLLLESQPLWPYDLQGSLTFRDVAIEFSLEEWQCLDTAQQNLYRNVMLENYRNLVFLGIAAFKPDLIIFLEEGKESWNMKRHEMVEESPVICSHFAQDLWPEQGIEDSFQKVILRRYEKCGHENLHLKIGYTNVDECKVHKEGYNKLNQSLTTTQSKVFQRGKYANVFHKCSNSNRHKIRHTGKKHLQCKEYVRSFCMLSHLSQHKRIYTRENSYKCEEGGKAFNWSSTLTYYKSAHTGEKPYRCKECGKAFSKFSILTKHKVIHTGEKSYKCEECGKAFNQSAILTKHKIIHTGEKPNKCEECGKAFSKVSTLTTHKAIHAGEKPYKCKECGKAFSKVSTLITHKAIHAGEKPYKCKECGKAFSKFSILTKHKVIHTGEKPYKCEECGKAYKWPSTLSYHKKIHTGEKPYKCEECGKGFSMFSILTKHEVIHTGEKPYKCEECGKAFNWSSNLMEHKKIHTGETPYKCEECGKGFSMFSILTKHKVIHNGEKPYKCEECDKATHAGEKPYKCEECGKAFNWSSNLMEHKRIHTGEKPYKCEECGKSFSTFSILTKHKVIHTGEKPYKCEECGKAYKWSSTLSYHKKIHTVEKPYKCEECGKAFNQSAILIKHKRIHTGEKPYKCEECGKTFSKVSTLTTHKAIHAGEKPYKCKECGKTFIKVSTLTTHKAIHAGEKPYKCKECGKAFSKFSILTKHKVIHTGEKPYKCEECGKAFNWSSNLMEHKRIHTGEKPYKCEECGKSFSTFSVLTKHKVIHTGEKPYKCEECGKAYKWSSTLSYHKKIHTVEKPYKCEECGKAFNRSAILIKHKRIHTDEKPYKCEECGKTFSKVSTLTTHKAIHAGEKPYKCKECGKAFSKFSILTKHKVIHTGEKPYKCEECGKAYKWPSTLSYHKKIHTGEKPYKCEECGKGFSMFSILTKHEVIHTGEKPYKCEECGKAFSWLSVFSKHKKTHAGEKFYKCEACGKAYKSSSTLSYHKKIHTEEKPYKYEECGKGFSTFSILTKHKVIHTGEKPYKCEECGKAFNWSSNLMEHKKIHTGETPYKCEECDKAFSWPSSLTEHKATHAGEKPYKCEECGKAFSWPSRLTEHKATHAGEEPYKCEECGKAFNWSSNLMEHKRIHTGEKPYKCEECGKSFSTFSILTKHKVIHTGEKPYKCEECGKAYKWSSTLSYHKKIHTVEKPYKCEECGKGFVMFSILAKHKVIHTGEKLYKCEECGKAYKWPSTLRYHKKIHTGEKPYKCEECGKAFSTFSILTKHKVIHTGEKPYKCEECGKAFSCYHKKIHTGEKPYKCEECGEAFNWSSNLMEHKRIHTGETPYKCEECGKGFSMFSILTKHKVIHTGEKPYKCKECGKAYKWSSTLSYHRKFILERNPTNVKKVAKPSAGSQSLNSYWRKNPTNMKNVAKLLINSQRLLNIREFVQEGNPTNLKNVASLLAIPQSLLNIHVIHTGGNSYNCVECCNALNQSLRLTTYKTTHTGEKPCMCEECGKASNRSSILKRHKLIHTQERLYKPERCDNAFGNTSDFSEYKRNRTDEKS

SEQ ID NO: 290 - protein, 123 aa, Homo sapiens
MSEKSGQSTKAKDGKKYATLSLFNTYKGKSLETQKTTARHGLQSLGKVGISRRMPPPANLPSLKAENKGNDPNVNIVPKDGTGWASKQEQHEEEKNTRSATSTAKTCGCSSPRSSTCSQIMGQ

SEQ ID NO: 291 - protein, 69 aa, Homo sapiens
MAWAPLLLTLLAHCTGSWASFMLTQPHSMSESPGKTATISCTRSSGNIASYYVQWYQQRPGQFPHYCDL

SEQ ID NO: 292 - protein, 221 aa, Homo sapiens [sequence omitted]

SEQ ID NO: 293 - protein, 488 aa, Homo sapiens
MPKVKALQCALALEISSVTCPGVVLKDKEDIYLSICVFGQYKKTQCVPATFPLVFNARMVFEKVFPDAVDPGDVVTQLEYDTAVFELIQLVPPVGETLSTYDENTRDFMFPGPNQMSGHHDSNRQVTMRRISGLRGNAPRLEFSTTSVITECLISSRKCHTQDKFIYHLAPVEKSHGRLQNRTSRSQKKKSKSPERSKYCINAKNYEQPTISSKSHSPSPYTKRRMCELSEDTRRRLAHLNLGPYEFKKETDKPPFVIRHVDPPSPRADTLLGSSGRDCERDGWSRVHNDHSHLGCCRPKDYKVIRTPHGRDFDDSLEKCEEYLSPRSCSKPRHSARTLLVHSAPSTMPKHSPSPVLNRASLRERFHSDWCSPSNCDEIHDRVKNVLKSHQAHQRHLYDERDLEKDDELELKRSLLCRDSAYDSDPEYSSCQQPRGTFHLDDGEYWSNRAASYKGKSHRPIFENSMDKMYRNLYKKACSSASHTQESF

SEQ ID NO: 294 - protein, 482 aa, Homo sapiens
MLDKEEREQGWVLIDLSEEYTRMGLPNHYWQLSDVNRDYRFSILLTKTVEVSKGGIITEDFIRGLDFSCGFSTPTTPSSRVIKVCDSYPTELYVPKSATAHIIVGSSKFRSRRRFPVLSYYYKDNHASICRSSQPLSGFSARCLEDEQMLQAIRKANPGSDFVYVVDTRPKLNAMANRAAGKGYENEDNYSNIKFQFIGIENIHVMRNSLQKMLEVCELKSPSMSDFLWGLENSGWLRHIKAIMDAGIFIAKAVSEEGASVLVHCSDGWDRTAQVCSVASLLLDPHYRTLKGFMVLIEKDWISFGHKFNHRYGNLDGDPKEISPVIDQFIECVWQLMEQFPCAFEFNERFLIHIQHHIYSCQFGNFLCNSQKERRELKIQERTYSLWAHLWKNRADNLNLLFRADHSQTQGTFHLPTTPCNFMYKFWSGMYNRFEKGMQPRQSVTDYLMAVKEETQQLEEELEALEEVRHTCFVNLFSVLIS

SEQ ID NO: 295 - protein, 593 aa, Homo sapiens
MTPDLLNFKKGWMSILDEPGEPPSPSLTTTSTSQWKKHWFVLTDSSLKYYRDSTAEEADELDGEIDLRSCTDVTEYAVQRNYGFQIHTKDAVYTLSAMTSGIRRNWIEALRKTVRPTSAPDVTKLSDSNKENALHSYSTQKGPLKAGEQRAGSEVISRGGPRKADGQRQALDYVELSPLTQASPQRARTPARTPDRLAKQEELERDLAQRSEERRKWFEATDSRTPEVPAGEGPRRGLGAPLTEDQQNRLSEEIEKKWQELEKLPLRENKRVPLTALLNQSRGERRGPPSDGHEALEKEVQALRAQLEAWRLQGEAPQSALRSQEDGHIPPGYISQEACERSLAEMESSHQQVMEELQRHHERELQRLQQEKEWLLAEETAATASAIEAMKKAYQEELSRELSKTRSLQQGPDGLRKQHQSDVEALKRELQVLSEQYSQKCLEIGALMRQAEEREHTLRRCQQEGQELLRHNQELHGRLSEEIDQLRGFIASQGMGNGCGRSNERSSCELEVLLRVKENELQYLKKEVQCLRDELQMMQKDKRFTSGKYQDVYVELSHIKTRSEREIEQLKEHLRLAMAALQEKESMRNSLAE

SEQ ID NO: 296 - protein, 758 aa, Homo sapiens
MGGCTVKPQLLLLALVLHPWNPCLGADSEKPSSIPTDKLLVITVATKESDGFHRFMQSAKYFNYTVKVLGQGEEWRGGDGINSIGGGQKVRLMKEVMEHYADQDDLVVMFTECFDVIFAGGPEEVLKKFQKANHKVVFAADGILWPDKRLADKYPVVHIGKRYLNSGGFIGYAPYVNRIVQQWNLQDNDDDQLFYTKVYIDPLKREAINITLDHKCKIFQTLNGAVDEVVLKFENGKARAKNTFYETLPVAINGNGPTKILLNYFGNYVPNSWTQDNGCTLCEFDTVDLSAVDVHPNVSIGVFIEQPTPFLPRFLDILLTLDYPKEALKLFIHNKEVYHEKDIKVFFDKAKHEIKTIKIVGPEENLSQAEARNMGMDFCRQDEKCDYYFSVDADVVLTNPRTLKILIEQNRKIIAPLVTRHGKLWSNFWGALSPDGYYARSEDYVDIVQGNRVGVWNVPYMANVYLIKGKTLRSEMNERNYFVRDKLDPDMALCRNAREMTLQREKDSPTPETFQMLSPPKGVFMYISNRHEFGRLLSTANYNTSHYNNDLWQIFENPVDWKEKYINRDYSKIFTENIVEQPCPDVFWFPIFSEKACDELVEEMEHYGKWSGGKHHDSRISGGYENVPTDDIHMKQVDLENVWLHFIREFIAPVTLKVFAGYYTKGFALLNFVVKYSPERQRSLRPHHDASTFTINIALNNVGEDFQGGGCKFLRYNCSIESPRKGWSFMHPGRLTHLHEGLPVKNGTRYIAVSFIDP

SEQ ID NO: 297 - protein, 491 aa, Homo sapiens
MSGTKPDILWAPHHVDRFVVCDSELSLYHVESTVNSELKAGSLRLSEDSAATLLSINSDTPYMKCVAWYLNYDPECLLAVGQANGRVVLTSLGQDHNSKFKDLIGKEFVPKHARQCNTLAWNPLDSNWLAAGLDKHRADFSVLIWDICSKYTPDIVPMEKVKLSAGETETTLLVTKPLYELGQNDACLSLCWLPRDQKLLLAGMHRNLAIFDLRNTSQKMFVNTKAVQGVTVDPYFHDRVASFYEGQVAIWDLRKFEKPVLTLTEQPKPLTKVAWCPTRTGLLATLTRDSNIIRLYDMQHTPTPIGDETEPTIIERSVQPCDNYIASFAWHPTSQNRMIVVTPNRTMSDFTVFERISLAWSPITSLMWACGRHLYECTEEENDNSLEKDIATKMRLRALSRYGLDTEQVWRNHILAGGTKSDEKVDLSKDKKLAQFNNWFTWCHNCRHGGHAGHMLSWFRDHAECPVSACTCKCMQLDTTGNLVPAETVQP

SEQ ID NO: 298 - protein, 223 aa, Homo sapiens
MYSSGWPAGAAEPRHGRGRELAQALGCMHGAPSQLASLSLAHCSSLKSRPELEHQASGTKDACPEPQGPSLLTLRALQELDLTACSKLTDASLAKVLQFLQLRQLSLSLLPELTDNGLVAVARGCPSLEHLALSHCSRLSDKGWAQAASSWPRLQHLNLSSCSQLIEQTLDAIGQACRQLRVLDVATCPGINMAAVRRFQAQLPQVSCVQSRFVGGADLTLTL

SEQ ID NO: 299 - protein, 151 aa, Homo sapiens
MCDFTEDQTAEFKEAFQLFDRTGDGKILYSQCGDVMRALGQNPTNAEVLKVLGNPKSDEMNVKVLDFEHFLPMLQTVAKNKDQGTYEDYVEGLRVFDKEGNGTVMGAEIRHVLVTLGEKMTEEEVEMLVAGHEDSNGCINYEELVRMVLNG

SEQ ID NO: 300 - protein, 227 aa, Homo sapiens
MEGHRCGAGTCPVLPTSPPPSPHLRLPTELSVAQCTQRPVDIVFLLDGSERLGEQNFHKARRFVEQVARRLTLARRDDDPLNARVALLQFGGPGEQQVAFPLSHNLTAIHEALETTQYLNSFSHVGAGVVHAINAIVRSPRGGARRHAELSFVFLTDGVTGNDSLHESAHSMRKQNVVPTVLALGSDVDMDVLTTLSLGDRAAVFHEKDYDSLAQPGFFDRFIRWIC

SEQ ID NO: 301 - protein, 184 aa, Homo sapiens [sequence omitted]

SEQ ID NO: 302 - protein, 376 aa, Homo sapiens
MNYEFEREIGFINSQPSLAECLTSFPPVADTFQSSSIKTSTLSHSTLIPPPFEQTIPSLNPGSHPRHGAGGRPKPSPAGSRGSPVPAGALQPPEYPWMKEKKAAKKTALLPAAAAAATAAATGPACLSHKESLEIADGSGGGSRRLRTAYTNTQLLELEKEFHFNKYLCRPRRVEIAALLDLTERQVKVWFQNRRMKHKRQTQCKENQNSEGKCKSLEDSEKVEEDEEEKTLFEQALSVSGALLEREGYTFQQNALSQQQAPNGHNGDSQSFPVSPLTSNEKNLKHFQHQSPTVPNCLSTMGQNCGAGLNNDSPEALEVPSLQDFSVFSTDSCLQLSDAVSPSLPGSLDSPVDISADSLDFFTDTLTTIDLQHLNY

SEQ ID NO: 303 - protein, 147 aa, Homo sapiens
MAPYTRDGNCPSYVKRRWGKRATLAKLLTCASACFCGEYLQHTRGQKTQAASREGKWVLEPRVSIQFLDVDSTASFVYSGDRVSLCHPGWSKVIQSQLRKHRTLGLKQSSCLSLPNSWDYKHESLCLANLLYLLSFILHPWITRSIK

SEQ ID NO: 304 - protein, 88 aa, Homo sapiens
MASSDVKPTSVSHAKKWSEEIENLYRFQQAGYRDETEYRQVKQVSMVDRWPETGYVKKLQRRDNTFYYYNKQRECDDKEVHKVKIYAY

SEQ ID NO: 305 - protein, 237 aa, Homo sapiens
MAASAAETRVFLEVRGQLQSALLILGEPKEGGMPMNISIMPSSLQMKTPEGCTEIQLPAEVRLVPSSCRGLQFVVGDGLHLRLQTQAKLGTKLISMFNQSSQTQECCTFYCQSCGEVIIKDRKLLRVLPLPSENWGALVGEWCCHPDPFANKSLHPQENDCFIGDSFFLVNLRTSLWQQRPELSPVEMCCVSSDNHCKLEPKANTKVICKRCKVMLGETVSSGKNFITRSQNDWLLA

SEQ ID NO: 306 - protein, 167 aa, Homo sapiens
MTETREPAETGGYASLEEDDEDLSPGPEHSSDSEYTLSEPDSEEEEDEEEEEEETTDDPEYDPGYKVKQRLGGGRGGPSRRAPRAAQPPAQPCQLCGRSPLGEAPPGTPRCTGTSCCMPGVRCRQSPHTGSLAEGVGWEEGAEEIGVVTVVMGDGVLPVCVVLEVDV

SEQ ID NO: 307 - protein, 781 aa, Homo sapiens
MTDTRRRVKVYTLNEDRQWDDRGTGHVSSGYVERLKGMSLLVRAESDGSLLLESKINPNTAYQKQQDTLIVWSEAENYDLALSFQEKAGCDEIWEKICQVQGKDPSVDITQDLVDESEEERFDDMSSPGLELPSCELSRLEEIAELVASSLPSPLRREKLALALENEGYIKKLLELFHVCEDLENIEGLHHLYEIIKGIFLLNRTALFEVMFSEECIMDVIGCLEYDPALSQPRKHREFLTKTAKFKEVIPISDPELKQKIHQTYRVQYIQDMVLPTPSVFEENMLSTLHSFIFFNKVEIVGMLQEDEKFLTDLFAQLTDEATDEEKRQELGMDDTQVRSAATDIFSYLVEYNPSMVREFVMQEAQQNDDDILLINLIIEHMICDTDPELGGAVQLMGLLRTLVDPENMLATANKTEKTEFLGFFYKHCMHVLTAPLLANTTEDKPSKDDFQTAQLLALVLELLTFCVEHHTYHIKNYIINKDILRRVLVLMASKHAFLALCALRFKRKIIGLKDEFYNRYIMKSFLFEPVVKAFLNNGSRYNLMNSAIIEMFEFIRVEDIKSLTAHVIENYWKALEDVDYVQTFKGLKLRFEQQRERQDNPKLDSMRSILRNHRYRRDARTLEDEEEMWFNTDEDDMEDGEAVVSPSDKTKNDDDIMDPISKFMERKKLKESEEKEVLLKTNLSGRQSPSFKLSLSSGTKTNLTSQSSTTNLPGSPGSPGSPGSPGSPGSVPKNTSQTAAITTKGGLVGLVDYPDDDEDDDEDEDKEDTLPLSKKAKFDS

SEQ ID NO: 308 - protein, 97 aa, Homo sapiens
MSSAPEPPTFKKEPPKEKEFQSPGLRGVRTTTLFRAVNPELFIKPNKPVMAFGLVTLSLCVAYIGYLHAIQENKKDLYEAIDSEGHSYMRRKTSKWD

SEQ ID NO: 309 - protein, 278 aa, Homo sapiens
MAALFLKRLTLQTVKSENSCIRCFGKHILQKTAPAQLSPIASAPRLSFLIHAKAFSTAEDTQNEGKKTKKNKTAFSNVGRKISQRVIHLFDEKGNDLGNMHRANVIRLMDERDLRLVQRNTSTEPAEYQLMTGLQILQERQRLREMEKANPKTGPTLRKELILSSNIGQHDLDTKTKQIQQWIKKKHLVQITIKKGKNVDVSENEMEEIFHQILQTMPGIATFSSRPQAVQGGKALMCVLRALSKNEEKAYKETQETQERDTLNKDHGNDKESNVLHQ

SEQ ID NO: 310 - protein, 456 aa, Homo sapiens
MTTTFLQTSSSTFGGGSTRGGSLLAGGGGFGGGSLSGGGGSRSISASSARFVSSGSGGGYGGGMRVCGFGGGAGSVFGGGFGGGVGGGFGGGFGGGDGGLLSGNEKITMQNLNDRLASYLDKVRALEEANADLEVKIHDWYQKQTPASPECDYSQYFKTIEELRDKIMATTIDNSRVILEIDNARLAADDFRLKYENELALRQGVEADINGLRRVLDELTLARTDLEMQIEGLNEELAYLKKNHEEEMKEFSSQLAGQVNVEMDAAPGVDLTRVLAEMREQYEAMAEKNRRDVEAWFFSKTEELNKEVASNTEMIQTSKTEITDLRRTMQELEIELQSQLSMKAGLENSLAETECRYATQLQQIQGLIGGLEAQLSELRCEMEAQNQEYKMLLDIKTRLEQEIATYRSLLEGQDAKMAGIGIREASSGGGGSSSNFHINVEESVDGQVVSSHKREI

SEQ ID NO: 311 - protein, 852 aa, Homo sapiens
MEPLTFKDVAIEFSLEEWQCLDTAQRDLYRNVLLENYRNLVFLGIAVSKPYLITCLEQKKEPWNIKRHEMVAKPPVMSFHFAQDLWPEQNIKDSFQKVTLRRYGKCEYENLQLRKGCKHVDECTGHKGGHNTVNQCLTATPSKIFQCNKYVKVFDKFSNSNRYKRRHTGNKHFKCKECSKSFCVLSQLTQHRRIHTRVNSYKCEECGKAFNWFSTLTKHKRIHTGEKPYKCEECGKAFNQSSQLTRHKIIHTEEKPNKCEECGKAFKQASHLTIHKIIHTGEKPYKYEECGKVFSQSSHLTTQKILHTGENLYKCKECGKAFNLFSNLTNHKRIHAGEKPYKCKECGRAFNISSNLNKQEKIHTGGKLNKCEECDKAFNRSLKLTAHKKILMEEKPYKCEECGKVFNQFSTLTRHKIIHTGEKPYKCKECGKAFNQSSNLTEHKKIHTAEKSYKCEECGKAFNQHSNLINHRKIYSGEKPYKCEECGKAFNRSSTLTRHKKIHTGEKPYKCEECDRAFSQSSNLTEHKKIHTGEKPYKCEECGKAFNRFSTLTKHKRIHTGEKPYKCEECGKAFNQSYQLTRHKIVHTKEKLNKCEEFGKAFKQSSHRTIHKIIHTGEKPYKCEEHGKVFNQSSNLTTQKIIHTGENLYKFEEHGKAFNLFSNITNHKIIYTGEKPHKCEECGKAYNRFSNLTIHKRIHTGEKPYQCAECGKAFNCSSTLNRHKIIHTGEKPYKCKECGKAFNLSSTLTAHKKIHTGEKPYKCEECGKAFNQSSNLTTHKKIHTSEKPYKCEECGKSFNQFSSLNIHKIIHTGEKPYKCGDYGRAFNLSSNLTTHKKIHTGEKPYKCEYGKT

SEQ ID NO: 312 - protein, 86 aa, Homo sapiens
MSLPLNPKPFLNGLTGKPVMVKLKWGMEYKGYLVSVDGYMNMQLANTEEYIDGALSGHLGEVLIRCNNVLYIRGVEEEEEDGEMRE

SEQ ID NO: 313 - protein, 66 aa, Homo sapiens
MPTNYTTWMKWTIIFEMESCSVALAGMQWYNHGFLQPPLPRLKQSCLSLPSSWDSAQRSGRLQSLW

SEQ ID NO: 314 - protein, 1549 aa, Homo sapiens [sequence omitted]

SEQ ID NO: 315 - protein, 731 aa, Homo sapiens
MLKEWAIKQGILLKVAETIKSWIFFSQCNKKDDLLHKLDIGFRLDSLHTILQQEVLLQEDVELIELLDPSILSAGQSQQQENGHLPTLCSLATPNIWDLSMLFAFISLLVMLPTWWIVSSWLVWGVILFVYLVIRALRLWRTAKLQVTLKKYSVHLEDMATNSRAFTNLVRKALRLIQETEVISRGFTLVSAACPFNKAGQHPSQHLIGLRKAVYRTLRANFQAARLATLYMLKNYPLNSESDNVTNYICVVPFKELGLGLSEEQISEEEAHNFTDGFSLPALKVLFQLWVAQSSEFFRRLALLLSTANSPPGPLLTPALLPHRILSDVTQGLPHAHSACLEELKRSYEFYRYFETQHQSVPQCLSKTQQKSRELNNVHTAVRSLQLHLKALLNEVIILEDELEKLVCTKETQELVSEAYPILEQKLKLIQPHVQASNNCWEEAISQVDKLLRRNTDKKGKPEIACENPHCTVVPLKQPTLHIADKDPIPEEQELEAYVDDIDIDSDFRKDDFYYLSQEDKERQKREHEESKRVLQELKSVLGFKASEAERQKWKQLLFSDHAVLKSLSPVDPVEPISNSEPSMNSDMGKVSKNDTEEESNKSATTDNEISRTEYLCENSLEGKNKDNSSNEVFPQGAEERMCYQCESEDEPQADGSGLTTAPPTPRDSLQPSIKQRLARLQLSPDFTFTAGLAAEVAARSLSFTTMQEQTFGDEEEEQIIEENKNEIEEK

SEQ ID NO: 316 - protein, 894 aa, Homo sapiens [sequence omitted]

SEQ ID NO: 317 - protein, 54 aa, Homo sapiens
MPGKKARKNAQPSPARAPAELEVECATQLRRFGDKLNFRQKLLNLISKLFCSGT

SEQ ID NO: 318 - protein, 336 aa, Homo sapiens
MEAASDRLGLGQRRSKTMVGKMWPVLWTLCAVRVTVDAISVETPQDVLRASQGKSVTLPCTYHTSTSSREGLIQWDKLLLTHTERVVIWPFSNKNYIHGELYKNRVSISNNAEQSDASITIDQLTMADNGTYECSVSLMSDLEGNTKSRVRLLVLVPPSKPECGIEGETIIGNNIQLTCQSKEGSPTPQYSWKRYNILNQEQPLAQPASGQPVSLKNISTDTSGYYICTSSNEEGTQFCNITVAVRSPSMNVALYVGIAVGVVAALIIIGIIIYCCCCRGKDDNTEDKEDARPNREAYEEPPEQLRELSREREEEDDYRQEEQRSTGRESPDHLDQ

SEQ ID NO: 319 - protein, 212 aa, Homo sapiens
MAKQYDVLFRLLLIGDSGVGKTCLLCRFTDNEFHSSHISTIGVDFKMKTIEVDGIKVRIQIWDTAGQERYQTITKQYYRRAQGIFLVYDISSERSYQHIMKWVSDVDEYAPEGVQKILIGNKADEEQKRQVGREQGQQLAKEYGMDFYETSACTNLNIKESFTRLTELVLQAHRKELEGLRMRASNELALAELEEEEGKPEGPANSSKTCWC

SEQ ID NO: 320 - protein, 1082 aa, Homo sapiens
MRINQYPESNAEYLASLFPDSLIVKGFNVVSAWALQLGPKDASRQVYICSNNIQARQQVIELARQLNFIPIDLGSLSSAREIENLPLRLFTLWRGPVVVAISLATFFFLYSFVRDVIHPYARNQQSDFYKIPIEIVNKTLPIVAITLLSLVYLAGLLAAAYQLYYGTKYRRFPPWLETWLQCRKQLGLLSFFFAMVHVAYSLCLPMRRSERYLFLNMAYQQSTLGYVALLISTFHVLIYGWKRAFEEEYYRFYTPPNFVLALVLPSIVILDLSVEVLASPAAAWKCLGANILRGGLSEIVLPIEWQQDRKIPPLSTPPPPAMWTEEAGATAEAQESGIRNKSSSSSQIPVVGVVTEDDEAQDSIDPPESPDRALKAANSWRNPVLPHTNGVGPLWEFLLRLLKSQAASGTLSLAFTSWSLGEFLGSGTWMKLETIILSKLTQEQKSKHCMFSLISGSLPFLKKKVSDEITYAEDTANSIALLGDLMKIPSSELRIQICKCIVDFYHAEPPKKHIPEVNCTIMMKAQAASGICTHLNDPDPSGQLLFRSSEILWNLLEKSSKEEVIQQLSNLECLLALKEVFKNLFMRGFSHYDRQLRNDILVITTIIAQNPEAPMIECGFTKDLILFATFNEVKSQNLLVKGLKLSNSYEDFELKKLLFNVIVILCKDLPTVQLLIDGKVILALFTYVKKPEKQKIIDWSAAQHEELQLHAIATLSSVAPLLIEEYMSCQGNARVLAFLEWCESEDPFFSHGNSFHGTGGRGNKFAQMRYSLRLLRAMVYLEDETVNKDLCEKGTIQQMIGLHDLYLVRPPISSCDLECRDHLGMQHSTPLYDRTIQKDKVHQIGYRLRLGFQIISPINQNFTEETVIFTIHSTGLHRGEGKGKREGSIAFGSVGKIGEIWNEIYEEIKLEKLRPVTTDKKALEAITTASENIGKMVASLQSDIIESQACQDMQNEQKVYAKIQATHKQRELANKSWEDFLARTSNAKTLKKAKSLQEKAIEASRYHKRPQNAIFHQTHIKGLNTTVPSGGVVTVESTPARLVGGPLVDTDIALKKLPIRGGALQRVKAVKIVDAPKKSIPT

SEQ ID NO: 321 - protein, 336 aa, Homo sapiens
MGPLSSMWGDTSLFSTSKSDHDVEESPCHHQTTNKKILREKDDAKDPKSLRASSSLAVQGGKIKRKFVDLGAPLRRNSSKGKKWKEKEKEASRFSAGSRIFRGRLENWTPKPCSTAQTSTRSPCMPFSWFNDSRKGSYSFRNLPAPTSSLQPSPETLISDKKGSKNFTFNDDFSPSSTSSADLSGLGAEPKTPGLSQPLALSSDEILDDGQSPKHSQCQNRAVQEWSVQQVSHWLMSLNLEQYVSEFSAQNITGEQLLQLDGNKLKALGMTASQDRAVVKKKLKEMKMSLEKARKAQEKMEKQREKLRRKEQEQMQRKSKKTEKMTSTTAEGAGEQ

SEQ ID NO: 322 - protein, 806 aa, Homo sapiens
MSASPDDLSTGGRLQNMTVDECFQSRNTVLQGQPFGGVPTVLCLNIALWVLVLVVYSFLRKAAWDYGRLALLIHNDSLTSLIYGEQSEKTSPSETSLEMERRDKGFCSWFFNSITMKDEDLINKCGDDARIYIVFQYHLIIFVLIICIPSLGIILPINYTGSVLDWSSHFARTTIVNVSTESKLLWLHSLLSFFYFITNFMFMAHHCLGFAPRNSQKVTRTLMITYVPKDIEDPELIIKHFHEAYPGSVVTRVHFCYDVRNLIDLDDQRRHAMRGRLFYTAKAKKTGKVMIRIHPCARLCFCKCWTCFKEVDAEQYYSELEEQLTDEFNAELNRVPLKRLDLIFVTFQDSRMAKRVRKDYKYVQCGVQPQQSSVTTIVKSYYWRVTMAPHPKDIIWKHLSVRRFFWWARFIAINTFLFFLFFFLTTPAIIMNTIDMYNVTRPIEKLQNPIVTQFFPSVMLWGFTVILPLIVYFSAFLEAHWTRSSQNLVMVHKCYIFLVFMVVILPSMGLTSLDVFLRWLFDIYYLEQASIRFQCVFLPDNGAFFVNYVITAALLGTGMELLRLGSLFCYSTRLFFSRSEPERVNIRKNQAIDFQFGREYAWMMNVFSVVMAYSITCPIIVPFGLLYLCMKHLTDRYNMYYSFAPTKLNEQIHMAAVSQAIFAPLLGLFWMLFFSILRLGSLHAITIFSLSTLLIAMVIAFVGIFLGKLRMVADYEPEEEEIQTVFDMEPSSTSSTPTSLLYVATVLQEPELNLTPASSPARHTYGTMNNQPEEGEEESGLRGFARELDSAQFQEGLELEGQNQYH

SEQ ID NO: 323 - protein, 412 aa, Homo sapiens
MGQDQTKQQIEKGLQLYQSNQTEKALQVWTKVLEKSSDLMGRFRVLGCLVTAHSEMGRYKEMLKFAVVQIDTARELEDADFLLESYLNLARSNEKLCEFHKTISYCKTCLGVPGTRAGAQLGGQVSLSMGNAFLGLSVFQKALESFEKALRYAHNNDDTMLECRVCCSLGSFYAQVKDYEKALFFPCKAAELVNNYGKGWSLKYRAMSQYHMAVAYRLLGRLGSAMECCEESMKIALQHGDRPLQALCLLCFADIHRSRGDLETAFPRYDSAMSIMTEIGNRLGQVQALLGVAKCWVARKALDKALDAIERAQDLAEEVGNKLSQLKLHCLSESIYRSKGLQRELRAHVVRFHECVEETELYCGLCGESIGEKNSRLQALPCSHIFHLRCLQNNGTRSCPNCRRSSMKPGFV

SEQ ID NO: 324 - protein, 385 aa, Homo sapiens
MVSVTMATSEWIQFFKEAGIPPGPAVNYAVMFVDNRIQKSMLLDLNKEIMNELGVTVVGDIIAILKHAKVVHRQDMCKAATESVPCSPSPLAGEIRRGTSAASRMITNSLNHDSPPSTPPRRPDTSTSKISVTVSNKMAAKSAKATAALARREEESLAVPAKRRRVTAEMEGKYVINMPKGTTPRTRKILEQQQAAKGLHRTSVFDRLGAETKADTTTGSKPTGVFSRLGATPETDEDLAWDSDNDSSSSVLQYAGVLKKLGRGPAKASPQPALTVKAKATSSATTAAAPTLRRLALSSRSGLERKPESLSKVSIIKRLGAAALVPEAQDSQVTSTKSKSSAEVKVTIKRTLVGPRGSSSSEGLGAQMDHAGTVSVFKRLGRRTF

SEQ ID NO: 325 - protein, 1273 aa, Homo sapiens
MIQVNHEYLSFRDKLYWTHGYVLISKEVEDCVPVFLKHIAHDIYVCGKTINLLKLCCPRHYLCWSDVPVPRISVIFSLEELKEIEKDCAVYVGRMERVARHSSVSKEEKELRMEIAKQELIAHAREAASRVLSALSDRQMSERMALDARKREQFQRLKEQFVKDQERRQAARQEELDDDFSYARELRDRERRLKSLEEELERKARQALVDHYSKLSAEAARREQKALWRIQRHRLESARLRFLLEDEKHIQEMLKAVSEAHQPQEPPDVLLSVHPQVTSPGPEHPEGGQGCDSGSAEQHSPAWDGWNRPGLLTPQPLKPLAVGAGGRGLQQAEGARPFSDSLSIGDFLPVGPGAEPSVQTGMVPLLEVALQTINLDLPPSAPGEAPAAASTQPSRPQEYDFSTVLRPAVATSPAPGPLQAAECSLGSSGLQLWEDSCGKMDACGSASRETLLPSHPPRRAALEEGSSQPTERLFGQVSGGGLPTGDYASEIAPTRPRWNTHGHVSDASIRVGENVSDVAPTQPRWNTHGHVSNASISLGESVSDVAPTRPRWNIHGHVSNASIRVGENVSDVAPTRPRWNTHGHVSNASIRVGENVSDVAPTRPRWNTHGHVSDASISLGESVSDMAPARPRWNTHGHVSDASISLGESVSDMAPTRPRWNTHGHVSDTSIRVGENVSDVAPIRSRCNTHGHVSDASISLGEPVSDVVSTRPRWNTHVPIPPPHMVLGALSPEAEPNTPRPQQSPPGHTSQSALSLGAQSTVLDCGPRLPVEVGPSLSSPSSGCGEGSISVGENVSDVAPTQPWWPNTPGDSVSEELGPGRSGDTEDLSPNWPLNSQEDTAAQSSPGRGEEAEASAAEAQGGEQAYLAGLAGQYHLERYPDSYESMSEPPIAHLLRPVLPRAFAFPVDPQVQSAADETAVQLSELLTLPVLMKRSITAPLAAHISLVNKAAVDYFFVELHLEAHYEALRHFLLMEDGEFAQSLSDLLFEKVASGHGLGAGQTPGELLNPLVLNSVLSKALQCSLHGDTPHASNLSLALKYLPEVFAPNAPDVLSCLELRYKVDWPLNIVITEGCLSKYSGVFSFLLQLKLMMWALKDVCFHLKRTALLSHMAGSVQFRQLQLFKHEMQHFVKVIQGYIANQILHVTWCEFRARLATVGDLEEIQRAHAEYLHKAVFRGLLTEKAAPVMNVIHSIFSLVLKFRSQLISQAWGPPGGPRGAEHPNFALMQQSYNTFKYYSHFLFKVVTKLVNRGYQPHLEDFLLRINFNNYYQDA

SEQ ID NO: 326 - protein, 64 aa, Homo sapiens [sequence omitted]

SEQ ID NO: 327 - protein, 140 aa, Homo sapiens
MGRSRSRSPRRERRRSRSTSRERERRRRERSRSRERDRRRSRSRSPHRRRSRSPRRHRSTSPSPSRLKERRDEEKKETKETKSKERQITEEDLEGKTEEEIEMMKLMGFASFDSTKGKKVDGSVNAYAINVSQKRKYRYA

SEQ ID NO: 328 - protein, 31 aa, Homo sapiens
MWWLMPIIPALLEAEARGLLEARNLRQAWAT

SEQ ID NO: 329 - protein, 562 aa, Homo sapiens
MEIASFVGPNVNTVGNLRPAQSAAGDGDEVQSVHSQRQDCQATGSLSNGENNEKNAFTTYQQETKNTTTPQSVYFLGVNKMSSQHREGSRGTSPPLPVLACFELAVARVGPRTPEVVRRSLAAEGAGSRGLDCFRLARRSKMADISLDELIRKRGAAAKGRLNARPGVGGVRSRVGIQQGLLSQSTRTATFQQRFDARQKIGLSDARLKLGVKDAREKLLQKDARFRIKGKVQDAREMLNSRKQQTTVPQKPRQVADAREKISLKRSSPAAFINPPIGTVTPALKLTKTIQVPQQKAMAPLHPHPAGMRINVVNNHQAKQNLYDLDEDDDGIASVPTKQMKFAASGGFLHHMAGLSSSKLSMSKALPLTKVVQNDAYTAPALPSSIRTKALTNMSRTLVNKEEPPKELPAAEPVLSPLEGTKMTVNNLHPRVTEEDIVELFCVCGALKRARLVHPGVAEVVFVKKDDAITAYKKYNNRCLDGQPMKCNLHMNGNVITSDQPILLRLSDSPSMKKESELPRRVNSASSSNPPAEVDPDTILKALFKSSGASVTTQPTEFKIKL

SEQ ID NO: 330 - protein, 48 aa, Homo sapiens
MSFSSPSMNWQEKFSCQAQWLTPVLPALWEAEVGALLEPRSLRPAWAT

SEQ ID NO: 331 - protein, 217 aa, Homo sapiens [sequence omitted]

SEQ ID NO: 332 - protein, 268 aa, Homo sapiens
MDGLSPSQSMKRGRDLGEAQLQLWVEKTGLRTISSMASFPLLLTLLTHCAGSWAQSVLTQPPSASGTPGQRVTISCSGSRSNVGSNNVNWYQQLPGTAPKLLIYSNNQRPSGVPDRFSGSKSGTSASLAISGLQSEDEADYYCATWDDSTVVFGGGTKLTVPGQPKAAPSVTLFPPSSEELQANKATLVCLISDFYPGAVTVAWKADSSPVKAGVETTTPSKQSNNKYAASSYLSLTPEQWKSHRSYSCQVTHEGSTVEKTVAPTECS

SEQ ID NO: 333 - protein, 137 aa, Homo sapiens [sequence omitted]

SEQ ID NO: 334 - protein, 1281 aa, Homo sapiens
MDGPTRGHGLRKKRRSRSQRDRERRSRGGLGAGAAGGGGAGRTRALSLASSSGSDKEDNGKPPSSAPSRPRPPRRKRRESTSAEEDIIDGFAMTSFVTFEALEKDVALKPQERVEKRQTPLTKKKREALTNGLSFHSKKSRLSHPHHYSSDRENDRNLCQHLGKRKKMPKALRQLKPGQNSCRDSDSESASGESKGFHRSSSRERLSDSSAPSSLGTGYFCDSDSDQEEKASDASSEKLFNTVIVNKDPELGVGTLPEHDSQDAGPIVPKISGLERSQEKSQDCCKEPIFEPVVLKDPCPQVAQPIPQPQTEPQLRAPSPDPDLVQRTEAPPQPPPLSTQPPQGPPEAQLQPAPQPQVQRPPRPQSPTQLLHQNLPPVQAHPSAQSLSQPLSAYNSSSLSLNSLSSSRSSTPAKTQPAPPHISHHPSASPFPLSLPNHSPLHSFTPTLQPPAHSHHPNMFAPPTALPPPPPLTSGSLQVAGHPAGSTYSEQDILRQELNTRFLASQSADRGASLGPPPYLRTEFHQHQHQHQHTHQHTHQHTFTPFPHAIPPTAIMPTPAPPMFDKYPTKVDPFYRHSLFHSYPPAVSGIPPMIPPTGPFGSLQGAFQPKTSNPIDVAARPGTVPHTLLQKDPRLTDPFRPMLRKPGKWCAMHVHIAWQIYHHQQKVKKQMQSDPHKLDFGLKPEFLSRPPGPSLFGAIHHPHDLARPSTLFSAAGAAHPTGTPFGPPPHHSNFLNPAAHLEPFNRPSTFTGLAAVGGNAFGGLGNPSVTPNSMFGHKDGPSVQNFSNPHEPWNRLHRTPPSFPTPPPWLKPGELERSASAAAHDRDRDVDKRDSSVSKDDKERESVEKRHSSHPSPAPVLPVNALGHTRSSTEQIRAHLNTEAREKDKPKERERDHSESRKDLAADEHKAKEGHLPEKDGHGHEGRAAGEEAKQLARVPSPYVRTPVVESARPNSTSSPGGPSPRKGEPAYENPKKSSEVKVKEERKEDHDLPPEAPQTHRASEPPPPNSSSSVHPGPLASMPMTVGVTGIHPMNSISSLDRTRMMTPFMGISPLPGGERFPYPSFHWDPIRDPLRDPYRELDIHRRDPLGRDFLLRNDPLHRLSTPRLYEADRSFRDREPHDYSHHHHHHHHPLSVDPRREHERGGHLDERERLHMLREDYEHTRLHSVHPASLDGHLPHPSLITPGLPSMHYPRISPTAGNQNGLLNKTPPTAALSAPPPLISTLGGRPVSPRRTTPLSAEIRGEAPFPHAEGYRGPISREQEQERGRRNPRQTPGQA

SEQ ID NO: 335 - protein, 133 aa, Homo sapiens [sequence omitted]

SEQ ID NO: 336 - protein, 796 aa, Homo sapiens
MMGLTDDRDISETVSETWSTDVLGSDFDPNIDEDRLQEIAGAAAENMLGSLLCLPGSGSVLLDPCTGSTISETTSEAWSVEVLPSDSEAPDLKQEERLQELESCSGLGSTSDDTDVREVSSRPSTPGLSVVSGISATSEDIPNKIEDLRSECSSDFGGKDSVTSPDMDEITHGAHQLTSPPSQSESLLAMFDPLSSHEGASAVVRPKVHYARPSHPPPDPPILEGAVGGNEARLPNFGSHVLTPAEMEAFKQRHSYPERLVRSRSSDIVSSVRRPMSDPSWNRRPGNEERELPPAAAIGATSLVAAPHSSSSSPSKDSSRGETEERKDSDDEKSDRNRPWWRKRFVSAMPKDDPSPRLSAQAQVAEDILDKYRNAIKRTSPSDGAMANYESTEVMGDGESAHDSPRDEALQNISADDLPDSASQAAHPQDSAFSYRDAKKKLRLALCSADSVAFPVLTHSTRNGLPDHTDPEDNEIVCFLKVQIAEAINLQDKNLMAQLQETMRCVCRFDNRTCRKLLASIAEDYRKRAPYIAYLTRCRQGLQTTQAHLERLLQRVLRDKEVANRYFTTVCVRLLLESKEKKIREFIQDFQKLTAADDKTAQVEDFLQFLYGAMAQDVIWQNASEEQLQDAQLAIERSVMNRIFKLAFYPNQDGDILRDQVLHEHIQRLSKVVTANHRALQIPEVYLREAPWPSAQSEIRTISAYKTPRDKVQCILRMCSTIMNLLSLANEDSVPGADDFVPVLVFVLIKANPPCLLSTVQYISSFYASCLSGEESYWWMQFTAAVEFIKTIDDRK

SEQ ID NO: 337 - protein, 334 aa, Homo sapiens
MDNSAQKNERTGKHPRRASEVQKGFTAAYPTQSSIPFKSQASVIPESEKKGFNSQAKRFPHKKNDIPGPGFYNVIHQSPVSNSVSLSKKGTCMFPSMCARLDTIISKYPAANAYTIPSDFISKRDFSNSCSSMFQLPSFMKALKFETPAPNYYNASVSCCKQRNNVCTRAGFMSKTQRGSFAFADKGPPPGHYDINESLVKQSPNTLMSCFKSKTNRGLKLTSTGPGPGYYNPSDCTKVPKKTLFPKNPILNFSAQPSPLPPKPPFPGPGQYEIVDYLGPRKHFISSASFVSNTSRWTAAPPQPGLPGPATYKPELPGKQSFLYNEDKKWIPVL

SEQ ID NO: 338 - protein, 323 aa, Homo sapiens
MWPLVAALLLGSACCGSAQLLFNKTKSVEFTFCNDTVVIPCFVTNMEAQNTTEVYVKWKFKGRDIYTFDGALNKSTVPTDFSSAKIEVSQLLKGDASLKMDKSDAVSHTGNYTCEVTELTREGETIIELKYRVVSWFSPNENILIVIFPIFAILLFWGQFGIKTLKYRSGGMDEKTIALLVAGLVITVIVIVGAILFVPGEYSLKNATGLGLIVTSTGILILLHYYVFSTAIGLTSFVIAILVIQVIAYILAVVGLSLCIAACIPMHGPLLISGLSILALAQLLGLVYMKFVASNQKTIQPPRKAVEEPLNAFKESKGMMNDE

SEQ ID NO: 339 - protein, 670 aa, Homo sapiens
MVKKRKGRVVIDSDTEDSGSDENLDQELLSLAKRKRSDSEEKEPPVSQPAASSDSETSDSDDEWTFGSNKNKKKGKARKIEKKGTMKKQANKTASSGSSDKDSSAESSAPEEGEVSDSDSNSSSSSSDSDSSSEDEEFHDGYGEDLMGDEEDRARLEQMTEKEREQELFNRIEKREVLKRRFEIKKKLKTAKKKEKKEKKKKQEEEQEKKKLTQIQESQVTSHNKERRSKRDEKLDKKSQAMEELKAEREKRKNRTAELLAKKQPLKTSEVYSDDEEEEEDDKSSEKSDRSSRTSSSDEEEEKEEIPPKSQPVSLPEELNRVRLSRHKLERWCHMPFFAKTVTGCFVRIGIGNHNSKPVYRVAEITGVVETAKVYQLGGTRTNKGLQLRHGNDQRVFRLEFVSNQEFTESEFMKWKEAMFSAGMQLPTLDEINKKELSIKEALNYKFNDQDIEEIVKEKERFRKAPPNYAMKKTQLLKEKAMAEDLGDQDKAKQIQDQLNELEERAEALDRQRTKNISAISYINQRNREWNIVESEKALVAESHNMKNQQMDPFTRRQCKPTIVSNSRDPAVQAAILAQLNAKYGSGVLPDAPKEMSKGQGKDKDLNSKSASDLSEDLFKVHDFDVKIDLQVPSSESKALAITSKAPPAKDGAPRRSLNLEDYKKRRGLI

SEQ ID NO: 340 - protein, 258 aa, Homo sapiens [sequence omitted]

SEQ ID NO: 341 - protein, 105 aa, Homo sapiens
MAHCSLDLSGSGDPPTSTSQVARTIGACHHVQLIFVFFGETGFHHVAPLVLELLDSSDPPTLASQSGGNRHEPPHRALKHIFLKHIWLFSFYFHQNGHEETMDQI

SEQ ID NO: 342 - protein, 404 aa, Homo sapiens [sequence omitted]

SEQ ID NO: 343 - protein, 358 aa, Homo sapiens
MSSLGCWCGVEDEAAPSKQSIYIQRETQVRTPMAGVSPKKAHPCEMCGPILGDILHVADHQGTHHKQKLHRCEAWGNKLYDSGNFHQHQNEHIGEKPYRGSVEEALFAKRCKLHVSGESSVFSESGKDFLLRSGLLQQEATHTGKSNSKTECVSLFHGGKSHYSCGGCMKHFSTKDILSQHERLLPTEEPSVWCECGKSSSKYDSFSNHQGVHTREKPYTCGICGKLFNSKSHLLVHQRIHTGEKPYECEVCQKFFRHKYHLIAHQRVHTGERPYECSDCGKSFTHSSTFRVHKRVHTGQKPYECSECGKSFAESSSLTKHRRVHTGEKPYGCSECEKKFRQISSLRHHQRVHKRKGL

SEQ ID NO: 344 - protein, 190 aa, Homo sapiens
MMMSDNAKGRAAHSWKKRGSISSLSNHEFWRKEIHGRIKDSMSTVSYMEEPSQRDDISRLTVQMENTYQLGPPKHFPVVTVNHILKDVVTSYLQVEEYEPELCRQMTKTISEVIKAQVKDLMIPRYKLIVIVHIGQLNRQSILIGSRCLWDPKSDTFSSYVFRNSSLFALANVYAVYLEVIENKKSSSYF

SEQ ID NO: 345 - protein, 870 aa, Homo sapiens
MNHLNVLAKALYDNVAESPDELSFRKGDIMTVLEQDTQGLDGWWLCSLHGRQGIVPGNRLKILVGMYDKKPAGPGSGPPATPAQPQPGLHAPAPPASQYTPMLPNTYQPQPDSVYLVPTPSKAQQGLYQVPGPSPQFQSPPAKQTSTFSKQTPHHPFPSPATDLYQVPPGPGGPAQDIYQVPPSAGMGHDIYQVPPSMDTRSWEGTKPPAKVVVPTRVGQGYVYEAAQPEQDEYDTPRHLLAPGPQDIYDVPPVRGLLPSQYGQEVYDTPPMAVKGPNGRDPLLEVYDVPPSVEKGLPPSNHHAVYDVPPSVSKDVPDGPLLREETYDVPPAFAKAKPFDPARTPLVLGAPPPDSPPAEDVYYVPPPAPDLYDVPPGLRRPGPGTLYDVPRERVLPPEVADGGVVDSGVYAVPPPAEREAPAEGKRLSASSTGSTRSSQSASSLEVAGPGREPLELEVAVEALARLQQGVSATVAHLLDLAGSAGATGSWRSPSEPQEPLVQDLQAAVAAVQSAVHELLEFARSAVGNAAHTSDRALHAKLSRQLQKMEDVHQTLVAHGQALDAGRGGSGATLEDLDRLVACSRAVPEDAKQLASFLHGNASLLFRRTKATAPGPEGGGTLHPNPTDKTSSIQSRPLPSPPKFTSQDSPDGQYENSEGGWMEDYDYVHLQGKEEFEKTQKELLEKGSITRQGKSQLELQQLKQFERLEQEVSRPIDHDLANWTPAQPLAPGRTGGLGPSDRQLLLFYLEQCEANLTTLTNAVDAFFTAVATNQPPKIFVAHSKFVILSAHKLVFIGDTLSRQAKAADVRTQVTHYSNLLCDLLRGIVATTKAAALQYPSPSAAQDMVERVKELGHSTQQFRRVLGQLAAA

SEQ ID NO: 346 - protein, 391 aa, Homo sapiens
MDRRKKPLDVTASSLVDLKAELFRKQEEFKQEKLLKDSGVFGKPKTTNKKPSIWSKQNVGVSNRAEKDAEQKIEEQKTLDKAREKLEEKAKLYEKMTKGDFIDEEVEDMYLVDFTQKIIDKRKEMEASGAHRDSQKAGERDDDEENLPEGEIPPPQDPSEEWVDYVDSLGRSRRCMRKDLPDLLEMDKNLQGRLFISPANEKTLLSEDMRKELQRQQWEEEEREALKRPMGPVHYEDIRENDGDVIGPLPPEPEAVPTPRPAAQSSKVEVIVQERKDTKPGVPHIREWDRGKEFSFGYWSKRQSDLRAERDPEFAPPSDYFVGQKRTGFSSSQAWSRPGPAQSDPGQCPDQSHGPSPEHTSPTPAPDNPPQAPTVTFKTLDDMISYYKQVT

SEQ ID NO: 347 - protein, 467 aa, Homo sapiens
MDRRKKPLDVTASSLVDLKAELFRKQEEFKQEKLLKDSGVFGKPKTTNKKPSIWSKQNVGVSNRAEKDAEQKIEEQKTLDKAREKLEEKAKLYEKMTKGDFIDEEVEDMYLVDFTQKIIDKRKEMEASGAHRDSQKAGERDDDEENLPEGEIPPPQDPSEEWVDYVDSLGRSRRCMRKDLPDLLEMDKNLQGRLFISPANEKTLLSEDMRKELQRQQWEEEEREALKRPMGPVHYEDIRENEARQLGVGYFAFARDKELRNKQMKTLEMLREQTTDQRTKRENIKEKRKAILEARLAKLRQKRMKKSKEGGTEEENRDGDVIGPLPPEPEAVPTPRPAAQSSKVEVIVQERKDTKPGVPHIREWDRGKEFSFGYWSKRQSDLRAERDPEFAPPSDYFVGQKRTGFSSSQAWSRPGPAQSDPGQCPDQSHGPSPEHTSPTPAPDNPPQAPTVTFKTLDDMISYYKQVT

SEQ ID NO: 348 - protein, 80 aa, Homo sapiens
MFPLVKSALNRLQVRSIQQTMARQSHQKRTPDFHDKYGNAVLASGATFCIVTWTYVATQVGIEWNLSPVGRVTPKEWRNQ

SEQ ID NO: 349 - protein, 122 aa, Homo sapiens
MLIYPMGLLKGTMSGRLWSKAIFAGYKRGLRNQREHTALLKIEGVYARDETEFYLGKRCAYVYKAKNNTVTPGGKPNKTRVIWGKVTRAHGNSGMVRAKFRSNLPAKAIGHRIRVMLYPSRI

SEQ ID NO: 350 - protein, 2969 aa, Homo sapiens
MDPRNTAMLGLGSDSEGFSRKSPSAISTGTLVSKREVELEKNTKEEEDLRKRNRERNIETGKDDGLTDAQQQFSVKETNFSEGILKLKIGLQAKRTKKPPKNLENYVCRPAIKTTIKHPRKALKSGKMTDEKNEHCPSKRDPSKLYKKADDVAAIECQSEEVIRLHSQGENNPLSKKLSPVHSEMADYINATPSTLLGSRDPDLKDRALLNGGTSVTEKLAQLIATCPPSKSSKTKPKKLGTGTTAGLVSKDLIRKAGVGSVAGIIHKDLIKKPTISTAVGLVTKDPGKKPVFNAAVGLVNKDSVKKLGTGTTAVFINKNLGKKPGTITTVGLLSKDSGKKLGIGIVPGLVHKESGKKLGLGTVVGLVNKDLGKKLGSTVGLVAKDCAKKIVASSAMGLVNKDIGKKLMSCPLAGLISKDAINLKAEALLPTQEPLKASCSTNINNQESQELSESLKDSATSKTFEKNVVRQNKESILEKFSVRKEIINLEKEMFNEGTCIQQDSFSSSEKGSYETSKHEKQPPVYCTSPDFKMGGASDVSTAKSPFSAVGESNLPSPSPTVSVNPLTRSPPEISSQLAPNPLLLSSTTELIEEVSESVGKNQFTSESTHLNVGHRSVGHSISIECKGIDKEVNDSKTTHIDIPRISSSLGKKPSLTSESSIHTITPSVVNFTSLFSNKPFLKLGAVSASDKHCQVAESLSTSLQSKPLKKRKGRKPRWTKVVARSTCRSPKGLELERSELFKNVSCSSLSNSNSEPAKFMKNIGPPSFVDHDFLKRRLPKLSKSTAPSLALLADSEKPSHKSFATHKLSSSMCVSSDLLSDIYKPKRGRPKSKEMPQLEGPPKRTLKIPASKVFSLQSKEEQEPPILQPEIEIPSFKQGLSVSPFPKKRGRPKRQMRSPVKMKPPVLSVAPFVATESPSKLESESDNHRSSSDFFESEDQLQDPDDLDDSHRPSVCSMSDLEMEPDKKITKRNNGQLMKTIIRKINKMKTLKRKKLLNQILSSSVESSNKGKVQSKLHNTVSSLAATFGSKLGQQINVSKKGTIYIGKRRGRKPKTVLNGILSGSPTSLAVLEQTAQQAAGSALGQILPPLLPSSASSSEILPSPICSQSSGTSGGQSPVSSDAGFVEPSSVPYLHLHSRQGSMIQTLAMKKASKGRRRLSPPTLLPNSPSHLSELTSLKEATPSPISESHSDETIPSDSGIGTDNNSTSDRAEKFCGQKKRRHSFEHVSLIPPETSTVLSSLKEKHKHKCKRRNHDYLSYDKMKRQKRKRKKKYPQLRNRQDPDFIAELEELISRLSEIRITHRSHHFIPRDLLPTIFRINFNSFYTHPSFPLDPLHYIRKPDLKKKRGRPPKMREAMAEMPFMHSLSFPLSSTGFYPSYGMPYSPSPLTAAPIGLGYYGRYPPTLYPPPPSPSFTTPLPPPSYMHAGHLLLNPAKYHKKKHKLLRQEAFLTTSRTPLLSMSTYPSVPPEMAYGWMVEHKHRHRHKHREHRSSEQPQVSMDTGSSRSVLESLKRYRFGKDAVGERYKHKEKHRCHMSCPHLSPSKSLINREEQWVHREPSESSPLALGLQTPLQIDCSESSPSLSLGGFTPNSEPASSDEHTNLFTSAIGSCRVSNPNSSGRKKLTDSPGLFSAQDTSLNRLHRKESLPSNERAVQTLAGSQPTSDKPSQRPSESTNCSPTRKRSSSESTSSTVNGVPSRSPRLVASGDDSVDSLLQRMVQNEDQEPMEKSIDAVIATASAPPSSSPGRSHSKDRTLGKPDSLLVPAVASDSCNNSISLLSEKLTSSCSPHHIKRSVVEAMQRQARKMCNYDKILATKKNLDHVNKILKAKKLQRQARTGNNFVKRRPGRPRKCPLQAVVSMQAFQAAQFVNPELNRDEEGAALHLSPDTVTDVIEAVVQSVNLNPEHKKGLKRKGWLLEEQTRKKQKPLPEEEEQENNKSFNEAPVEIPSPSETPAKPSEPESTLQPVLSLIPREKKPPRPPKKKYQKAGLYSDVYKTTDPKSRLIQLKKEKLEYTPGEHEYGLFPAPIHVVFFVSGKYLRQKRIDFQLPYDILWQWKHNQLYKKPDVPLYKKIRSNVYVDVKPLSGYEATTCNCKKPDDDTRKGCVDDCLNRMIFAECSPNTCPCGEQCCNQRIQRHEWVQCLERFRAEEKGWGIRTKEPLKAGQFIIEYLGEVVSEQEFRNRMIEQYHNHSDHYCLNLDSGMVIDSYRMGNEARFINHSCDPNCEMQKWSVNGVYRIGLYALKDMPAGTELTYDYNFHSFNVEKQQLCKCGFEKCRGIIGGKSQRVNGLTSSKNSQPMATHKKSGRSKEKRKSKHKLKKRRGHLSEEPSENINTPTRLTPQLQMKPMSNRERNFVLKHHVFLVRNWEKIRQKQEEVKHTSDNIHSASLYTRWNGICRDDGNIKSDVFMTQFSALQTARSVRTRRLAAAEENIEVARAARLAQIFKEICDGIISYKDSSRQALAAPLLNLPPKKKNADYYEKISDPLDLITIEKQILTGYYKTVEAFDADMLKVFRNAEKYYGRKSPVGRDVCRLRKAYYNARHEASAQIDEIVGETASEADSSETSVSEKENGHEKDDDVIRCICGLYNDEGLMIQCDKCMVWQHCDCMGVNSDVEHYLCEQCDPRPVDREVPMIPRPHYAQPGCVYFICLLRDDLLLRQGDCVYLMRDSRRTPDGHPVRQSYRLLSHINRHKLDIFRIEKLWKNEKEERFAFGHHYFRPHETHHSPSRRFYHNELFRVPLYEIIPLEAVVGTCCVLDLYTYCKGRPKGVKEQDVYICDYRLDKSAHLFYKIHRNRYPVCTKPYAFDHFPKKLTPKKDFSPHYVPDNYKRNGGRSSWKSERSKPPLKDLGQEDDALPLIEEVLASQEQAANEIPSLEEPEREGATANVSEGEKKTEESSQEPQSTCTPEERRHNQRERLNQILLNLLEKIPGKNAIDVTYLLEEGSGRKLRRRTLFIPENSFRK

SEQ ID NO: 351 - protein, 60 aa, Homo sapiens [sequence omitted]

SEQ ID NO: 352 - protein, 120 aa, Homo sapiens [sequence omitted]

SEQ ID NO: 353 - protein, 95 aa, Homo sapiens
MMMTATQRARHPTQAHFKILLASSLLKFLYPKQGTQLVQISTGLQISRSKNGVFTSAPYLSLQEILGLAASDMSWNPLPEIAVFLDGLSTSSTTK

SEQ ID NO: 354 - protein, 74 aa, Homo sapiens
MPKYYEDKPQGGACAGLKEDLGACLLQSDCVVQEGKSPRQCLKEGYCNSLKYAFFECKRSVLDNRARFRGRKGY

SEQ ID NO: 355 - protein, 228 aa, Homo sapiens
MAAAVLGQLGALWIHNLRSRGKLALGVLPQSYIHTSASLDISRKWEKKNKIVYPPQLPGEPRRPAEIYHCRRQIKYSKDKMWYLAKLIRGMSIDQALAQLEFNDKKGAKIIKEVLLEAQDMAVRDHNVEFRSNLYIAESTSGRGQCLNTIRYHGRGRFGIMEKVYCHYFVKLVEGPPPPPEPPKTAVAHAKEYIQQFAAGPSFTLYDEEIQTPQCIYFAIYFLKINKN

SEQ ID NO: 356 - protein, 552 aa, Homo sapiens
MPPTFWILFLHLSGDRSRLYGAAYEKPKFITAAKGKVQAVGGSCKVMRLAISPTAFSHLLACAQQFRKQTQAQVYSEDMALNIGSEPEGLQVEEKERPVQRLSSVLGPLEELLQPLFPLLSLSKARVQTPAVVADSGKSKGKDKERKTSTGQHSTVQPEVADKIVLVADRHLLELPLEGLSVFDEGTISSVSREFSLQMLWNRLHKEETEGGVKKEGRSRDPKKRSLAKKGRKGSIPRTIPPDCIIVDSDNFKFVVDPYEEAQGPEMLTPVSITQDILERFQDTFTSRWAGHLGSKHFPSQAQWEQALGSCSGFFFYGMESFLSHILVERLVAMNLQECQVAVLLDLARSYQSLKRHMESVEHRRSVGRWEANWRNGASPSEDEWRRGGEPRRGFSDLEGQAAAAPKLRAPSHHAQLGPVWAAAPSHRVVQAWTCLPSAAGAPALASALGSAPLPTHPHLPAPIPSSQLALPFLGLSPALGAASARDPPPATSRKAAAWTSSSACLCAPWGLRRGWSCVSSRGQDKGGLPLAALVLSCLDQKTIQTVSLFLI

SEQ ID NO: 357 - protein, 194 aa, Homo sapiens
MKLASGFLVLWLSLGGGLAQSDTSPDTEESYSDWGLRHLRGSFESVNSYFDSFLELLGGKNGVCQYRCRYGKAPMPRPGYKPQEPNGCGSYFLGLKVPESMDLGIPAMTKCCNQLDVCYDTCGANKYRCDAKFRWCLHSICSDLKRSLGFVSKVEACDSLVDTVFNTVWTLGCRPFMNSQRAACICAEEEKEEL

SEQ ID NO: 358 - protein, 437 aa, Homo sapiens
MSEEKDCGGGDALSNGIKKHRTSLPSPMFSRNDFSIWSILRKCIGMELSKITMPVIFNEPLSFLQRLTEYMEHTYLIHKASSLSDPVERMQCVAAFAVSAVASQWERTGKPFNPLLGETYELVRDDLGFRLISEQVSHHPPISAFHAEGLNNDFIFHGSIYPKLKFWGKSVEAEPKGTITLELLEHNEAYTWTNPTCCVHNIIVGKLWIEQYGNVEIINHKTGDKCVLNFKPCGLFGKELHKVEGYIQDKSKKKLCALYGKWTECLYSVDPATFDAYKKNDKKNTEEKKNSKQMSTSEELDEMPVPDSESVFIIPGSVLLWRIAPRPPNSAQMYNFTSFAMVLNEVDKDMESVIPKTDCRLRPDIRAMENGEIDQASEEKKRLEEKQRAARKNRSKSEEDWKTRWFHQGPNPYNGAQDWIYSGSYWDRNYFNLPDIY

SEQ ID NO: 359 - protein, 124 aa, Homo sapiens [sequence omitted]

SEQ ID NO: 360 - protein, 180 aa, Homo sapiens
MSVLRPLDKLPGLNTATILLVGTEDALLQQLADSMLKEDCASELKVHLAKSLPLPSSVNRPRIDLIVFVVNLHSKYSLQNTEESLRHVDASFFLGKVCFLATGAGRESHCSIHRHTVVKLAHTYQSPLLYCDLEVEGFRATMAQRLVRVLQICAGHVPGVSALNLLSLLRSSEGPSLEDL

SEQ ID NO: 361 - protein, 169 aa, Homo sapiens [sequence omitted]

SEQ ID NO: 362 - protein, 176 aa, Homo sapiens
MVYTLWAAVWVTWNVFIICFYLEVGGLLKDSELLTFSLSRHRSWWRERWPGCLHEEVPAVGLGAPHGQDLVSGAGCALEPSYVEALHSCLQILIAAQNQNPRWLAPQRRRNPWWLLAGVGWGQSFWALSVAARWSACLRRKRTALISLVDLIHFLSTMSMKSHPVSCPSRCTCLRK

SEQ ID NO: 363 - protein, 160 aa, Homo sapiens
MQCLASQAAASRDCFRREPTLLTCALSLQFCTELNQPTLPNIRKWKGPRGCWKAVVAEKPSNQLQKVPSSAKPGLSLHLIYTYFSPNQGHLKISFANIPGSILYFCPIFKSLPFISKCPGFRFTFRLVMDSCQEGNESLRVLGGEEGRKATNGYFCPLSF

SEQ ID NO: 364 - protein, 379 aa, Homo sapiens
MYNIKQSTDTKEAAAIEARRNREKERQNRFFNVRNRVMGVDVQALNNQVGDRKRREAAERSKEAAYGTSQVQYDVVVQMLEKEEADRTRQLAKKVQEFREQKQQLKNGREFSLWDPGQVWKGLPTYLSYSNTYPGPASLQYFSGEDLDRDTRLRMQQGQFRYNLERQQQEQQQAKVDENYTDALSNQLRLAMDAQATHLARLEESCRAAMMCAMANANKAQAAVQAGRQRCERQREQKANLAEIQHQSTSDLLTENPQVAQHPMAPYRVLPYCWKGMTPEQQAAIRKEQEVQRSKKQAHRQAEKTLDTEWKSQTMSSAQAVLELEEQERELCAVFQRGLGSFNQQLANEQKAQQDYLNSVIYTNQPTAQYHQQFNTSSR

SEQ ID NO: 365 - protein, 85 aa, Homo sapiens
MQKTVISAFRTEVPGSSHWDWLDSECSPKRASRSRVGHCLTWEAQGVGEFPFPAKGIHGRLYLENQDTPAQILRFSNGLSKWHLA

SEQ ID NO: 366 - protein, 1211 aa, Homo sapiens
MSPACVVSPHATYSTSIIPNATLSSSSEVIAIPTAQSAGQRESKSSGSSHARIKSRDHLISRHAVKGDPQSPGRHWNEGHATILSQDLDPHSPGEPALLALCDSAVPLNAPANRENGSQAMPYNCRNNLAFPAHPQDVDGKSESSYSGGGGHSSSEPWEYKSSGNGRASPLKPHLATPGYSTPTSNMSSCSLDQTSNKEDAGSLYSEDHDGYCASVHTDSGHGSGNLCNSSDGFGNPRHSVINVFVGRAQKNQGDRSNYQDKSLSRNISLKKAKKPPLPPSRTDSLRRIPKKSSQCNGQVLNESLIATLQHSLQLSLPGKSGSSPSQSPCSDLEEPWLPRSRSQSTVSAGSSMTSATTPNVYSLCGATPSQSDTSSVKSEYTDPWGYYIDYTGMQEDPGNPAGGCSTSSGVPTGNGPVRHVQEGSRATMPQVPGGSVKPKIMSPEKSHRVISPSSGYSSQSNTPTALTPVPVFLKSVSPANGKGKPKPKVPERKSSLISSVSISSSSTSLSSSTSTEGSGTMKKLDPAVGSPPAPPPPPVPSPPFPCPADRSPFLPPPPPVTDCSQGSPLPHSPVFPPPPPEALIPFCSPPDWCLSPPRPALSPILPDSPVSLPLPPPLLPSSEPPPAPPLDPKFMKDTRPPFTNSGQPESSRGSLRPPSTKEETSRPPMPLITTEALQMVQLRPVRKNSGAEAAQLSERTAQEQRTPVAPQYHLKPSAFLKSRNSTNEMESESQPASVTSSLPTPAKSSSQGDHGSAAERGGPVSRSPGAPSAGEAEARPSPSTTPLPDSSPSRKPPPISKKPKLFLVVPPPQKDFAVEPAENVSEALRAVPSPTTGEEGSVHSREAKESSAAQAGSHATHPGTSVLEGGAAGSMSPSRVEANVPMVQPDVSPAPKQEEPAENSADTGGDGESCLSQQDGAAGVPETNAAGSSSEACDFLKEDGNDEVMTPSRPRTTEDLFAAIHRSKRKVLGRRDSDDDHSRNHSPSPPVTPTGAAPSLASPKQVGSIQRSIRKSSTSSDNFKALLLKKGSRSDTSARMSAAEMLKNTDPRFQRSRSEPSPDAPESPSSCSPSKNRRAQEEWAKNEGLMPRSLSFSGPRYGRSRTPPSAASSRYSMRNRIQSSPMTVISEGEGEAVEPVDSIARGALGAAEGCSLDGLAREEMDEGGLLCGEGPAASLQPQAPGPVDGTASAEGREPSPQCGGSLSEES

SEQ ID NO: 367 - protein, 109 aa, Homo sapiens [sequence omitted]

SEQ ID NO: 368 - protein, 79 aa, Homo sapiens
MLLELSEEHKEHLAFLPQVDSAVVAEFGRIAVEFLRRGANPKIYEGAASKKGKGKAPQASRAVASHSLSPGRETDYCES

SEQ ID NO: 369 - protein, 361 aa, Homo sapiens
MGGAVSAGEDNDELIDNLKEAQYIRTELVEQAFRAIDRADYYLEEFKENAYKDLAWKHGNIHLSAPCIYSEVMEALDLQPGLSFLNLGSGTGYLSSMVGLILGPFGVNHGVELHSDVIEYAKQKLDFFIRTSDSFDKFDFCEPSFVTGNCLEISPDCSQYDRVYCGAGVQKEHEEYMKNLLKVGGILVMPLEEKLTKITRTGPSAWETKKILAVSFAPLIQPCHSESGKSRLVQLPPVAVRSLQDLARIAIRGTIKKIIHQETVSKNGNGLKNTPRFKRRRVRRRRMETIVFLDKEVFASRISNPSDDNSCEDLEEERREEEEKTPPETKPDPPVNFLRQKVLSLPLPDPLKYYLLYYREK

SEQ ID NO: 370 - protein, 703 aa, Homo sapiens [sequence omitted]

SEQ ID NO: 371 - protein, 271 aa, Homo sapiens
MFRDFGEPGPSSGNGGGYGGPAQPPAAAQAAQQKFHLVPSINTMSGSQELQWMVQPHFLGPSSYPRPLTYPQYSPPQPRPGVIRALGPPPGVRRRPCEQISPEEEERRRVRRERNKLAAAKCRNRRKELTDFLQAETDKLEDEKSGLQREIEELQKQKERLELVLEAHRPICKIPEGAKEGDTGSTSGTSSPPAPCRPVPCISLSPGPVLEPEALHTPTLMTTPSLTPFTPSLVFTYPSTPEPCASAHRKSSSSSGDPSSDPLGSPTLLAL

SEQ ID NO: 372 - protein, 1901 aa, Homo sapiens
MATFRNNHMKTKASVRKSFSEDVFQSVKSLLQSQKELCSVTAEDCLQQDEHANLTEVTFLGFNEETDAAHIQDLAAVSLELPDILNSLHFCSLNENEIICMKNINKPLDISSDPLNQSHPSGMLCVMRVSPTSPRLRIDFIFSLLSKYATGIRYTLDTFLHQKHQLETTDEDDDDTNQSVSSIEDDFVTAFEHLEEEETSKPYNDGMNITVLRSQCDAASQTVTGHHLETHDLKILISSGQQKSLAKPSTSSVNVLGHKELPSVKTSVTTSISEPWTQRSFYRSSNASDKDSDLQKTFFSSSPAYSSESECSSPSPVIFLDEEGYQKSLKAKLELPKIPVMKDDIEDSDSEVSEFFDSFDQFDELEQTLETCLFNKDPVIGKSSQRKGHKHGKSCMNPQKFKFDRPALPANVRKPTPRKPESPYGNLCDAPDSPRPVKASREDSGLFSPIRSSAFSPLGGCTPAECFCQTDIGGDRIHENHDSVYYTYEDYAKSISCEVLGSVLRTHHTNTLSNINSIKHGENKTVTFKHGNLDQKNKSKNKSLMIKNSIQKFAADLVEKSFGSAFKDLQKGVSSCTNALYHLAIKLTSSVLQMAFDELRRQRAFSLKERAISGLANFLVSEALSNALKDLQYVKKQIFTNTVARFAADLAEELVFEGIMEVCQFSYPQTPASPQCGSFDFEDKVVKLYAKDLSESVIQEAFIELSQVDVTFTTKAAVSVSTDNIKYVSAESVVPSTQAVTFSPSFHNQAIMVTKPVQEYKKEYTVQQALFCTSGIVTSIPVPLAGSALLPYHISSTACQAKAHLSSDDSNSNGDSAQVHIATKNREEKAACLRNICLPSEHNPGNQNDFKPTNDDIEMQSSSKLPNDPAIISNFSAAVVHTIVNETLESMTSLEVTKMVDERTDYLTKSLKEKTPPFSHCDQAVLQCSEASSNKDMFADRLSKSIIKHSIDKSKSVIPNIDKNAVYKESLPVSGEESQLTPEKSPKFPDSQNQLTHCSLSAAKDCVPECKVSMVHGSSLETLPSCPAVTGQKSDLKESAKDQPLKKHNLNSTSLEALSFGRENPFPHSHTFSSTALTCVDGLHVEDKQKVRDRNVIPDTPPSTPLVPSRASSEWDIKKLTKKLKGELAKEFAPATPPSTPHNSSVGSLSENEQNTIEKEEFMLKLMRSLSEEVESSESGELPEVDVKSEHSGKKVQFAEALATHILSLATEMAASHLDNKIIQEPKVKNPCLNVQSQRSVSPTFLNPSDENLKTLCNFAGDLAAEVITEAEKIAKVRNCMLFKQKKNSCYADGDEDYKVEEKLDIEAVVHPREVDPFILSLPPSSCMSGLMYKYPSCESVTDEYAGHLIQILKQEGGNSELIMDQYANRLAYRSVKSGLQEAAKTTKVQCNSRMFPVPSSQVKTNKELLMFSNKEHHQEADKKRQSKRNEGYFCKNQTCERTLDPYRNEVSQLYSFSTSLVHSITKDAKEELTASLVGLPKSLTDSCLFEKSGYEEDNECHVTPELPKSLQPSSQNHRFYHSTGSLNGYGCGDNVVQAVEQYAKKVVDDTLELTLGSTVFRVSETTKSADRVTYAEKLSPLTGQACRYCDLKELHNCTGNSSQHFFRQGSLASSKPASNPKFSSRYQKSRIFHLSVPQIHVNLDKKAVLAEKIVAEAIEKAERELSSTSLAADSGIGQEGASFAESLATETMTAAVTNVGHAVSSSKEIEDFQSTESVSSQQMNLSIGDDSTGSWSNLSFEDEHQDESSSFHHLSESNGNSSSWSSLGLEGDLYEDNLSFPTSDSDGPDDKDEEHEDEVEGLGQDGKTLLITNIDMEPCTVDPQLRIILQWLIASEAEVAELYFHDSANKEFMLLSKQLQEKGWKVGDLLQAVLQYYEVMEKASSEERCKSLFDWLLENA

SEQ ID NO: 373 - protein, 653 aa, Homo sapiens
MADTLPSEFDVIVIGTGLPESIIAAACSRSGRRVLHVDSRSYYGGNWASFSFSGLLSWLKEYQENSDIVSDSPVWQDQILENEEAIALSRKDKTIQHVEVFCYASQDLHEDVEEAGALQKNHALVTSANSTEAADSAFLPTEDESLSTMSCEMLTEQTPSSDPENALEVNGAEVTGEKENHCDDKTCVPSTSAEDMSENVPIAEDTTEQPKKNRITYSQIIKEGRRFNIDLVSKLLYSRGLLIDLLIKSNVSRYAEFKNITRILAFREGRVEQVPCSRADVFNSKQLTMVEKRMLMKFLTFCMEYEKYPDEYKGYEEITFYEYLKTQKLTPNLQYIVMHSIAMTSETASSTIDGLKATKNFLHCLGRYGNTPFLFPLYGQGELPQCFCRMCAVFGGIYCLRHSVQCLVVDKESRKCKAIIDQFGQRIISEHFLVEDSYFPENMCSRVQYRQISRAVLITDRSVLKTDSDQQISILTVPAEEPGTFAVRVIELCSSTMTCMKGTYLVHLTCTSSKTAREDLESVVQKLFVPYTEMEIENEQVEKPRILWALYFNMRDSSDISRSCYNDLPSNVYVCSGPDCGLGNDNAVKQAETLFQEICPNEDFCPPPPNPEDIILDGDSLQPEASESSAIPEANSETFKESTNLGNLEESSE

SEQ ID NO: 374 - protein, 558 aa, Homo sapiens [sequence omitted]

SEQ ID NO: 375 - protein, 128 aa, Homo sapiens
MQIFVKTLTGKTITLEVEPSDTIENVKAKIQDKEGIPPDQQRLIFAGKQLEDGRTLSDYNIQKESTLHLVLRLRGGIIEPSLRQLAQKYNCDKMICRKCYARLHPRAVNCRKKKCGHTNNLRPKKKVK

SEQ ID NO: 376 - protein, 75 aa, Homo sapiens
MAPEVLPKPRMRGLLARRLRNHMAVAFVLSLGVAALYKFRVADQRKKAYADFYRNYDVMKDFEEMRKAGIFQSVK

SEQ ID NO: 377 - protein, 146 aa, Homo sapiens
MAGELTPEEEAQYKKAFSAVDTDGNGTINAQELGAALKATGKNLSEAQLRKLISEVDSDGDGEISFQEFLTAAKKARAGLEDLQVAFRAFDQDGDGHITVDELRRAMAGLGQPLPQEELDAMIREADVDQDGRVNYEEFARMLAQE

SEQ ID NO: 378 - protein, 110 aa, Homo sapiens
MAAVVAKREGPPFISEAAVRGNAAVLDYCRTSVSALSGATAGILGLTGLYGFIFYLLASVLLSLLLILKAGRRWNKYFKSRRPLFTGGLIGGLFTYVLFWTFLYGMVHVY

SEQ ID NO: 379 - protein, 121 aa, Homo sapiens
MGKLLLTGAVFVLFCFFETVSLCRPGWICNGVISAHCKLHLLGSSNSCASASQVAGITGACHHARLIFVFLVETGFHHVGQAGLKLLTSSDLPASASQSAGITGLSHRAWPDSSFEGSSSS

SEQ ID NO: 380 - protein, 129 aa, Homo sapiens
MLECSGTILAHCNLRLLGSSDSLASASRVAGITGMCHHTQLIFFLFLVETGFCPVDQAGLKLLTSGDLPASASQSARITGMSHCAQPSVISLQHKFIVKEFENEPYLETYFGVYPWTFYILVATCKCTP

SEQ ID NO: 381 - protein, 261 aa, Homo sapiens
MSDEEVEQVEEQYEEEEEAQEEAAEVHEEVHEPEEVQEEEKPRPKLTAPKIPEGEKVDFDDIQKKRQNKDLMELQALIDSHFEARKKEEEELVALKERIEKRRAERAEQQRIRAEKERERQNRLAEEKARREEEDAKRRAEDDLKKKKALSSMGANYSSYLAKADQKRGKKQTAREMKKKILAERRKPLNIDHLGEDKLRDKAKELWETLHQLEIDKFEFGEKLKRQKYDITTLRSRIDQAQKHSKKAGTPAKGKVGGRWK

SEQ ID NO: 382 - protein, 240 aa, Homo sapiens
MSDEEVEQVEEQYEEEEEAKPRPKLTAPKIPEGEKVDFDDIQKKRQNKDLMELQALIDSHFEARKKEEEELVALKERIEKRRAERAEQQRIRAEKERERQNRLAEEKARREEEDAKRRAEDDLKKKKALSSMGANYSSYLAKADQKRGKKQTAREMKKKILAERRKPLNIDHLGEDKLRDKAKELWETLHQLEIDKFEFGEKLKRQKYDITTLRSRIDQAQKHSKKAGTPAKGKVGGRWK

SEQ ID NO: 383 - protein, 245 aa, Homo sapiens
MSDEEVEQVEEQYEEEEEAQEEEEKPRPKLTAPKIPEGEKVDFDDIQKKRQNKDLMELQALIDSHFEARKKEEEELVALKERIEKRRAERAEQQRIRAEKERERQNRLAEEKARREEEDAKRRAEDDLKKKKALSSMGANYSSYLAKADQKRGKKQTAREMKKKILAERRKPLNIDHLGEDKLRDKAKELWETLHQLEIDKFEFGEKLKRQKYDITTLRSRIDQAQKHSKKAGTPAKGKVGGRWK

SEQ ID NO: 384 - protein, 503 aa, Homo sapiens
MMVKGRLFVPDRINGTANKMNGALDHSDQPDPDAIKMFVGQIPRSWSEKELKELFEPYGAVYQINVLRDRSQNPPQSKGCCFVTFYTRKAALEAQNALHNIKTLPGMHHPIQMKPADSEKSNAVEDRKLFIGMVSKKCNENDIRVMFSPFGQIEECRILRGPDGLSRGCAFVTFSTRAMAQNAIKAMHQSQTMEGCSSPIVVKFADTQKDKEQRRLQQQLAQQMQQLNTATWGNLTGLGGLTPQYLALLQQATSSSNLGAFSGIQQMAGMNALQLQNLATLAAAAAAAQTSATSTNANPLSTTSSALGALTSPVAASTPNSTAGAAMNSLTSLGTLQGLAGATVGLNNINALAGMAALNGGLGATGLTNGTAGTMDALTQAYSGIQQYAAAALPTLYSQSLLQQQSAAGSQKEGPEGANLFIYHLPQEFGDQDILQMFMPFGNVISAKVFIDKQTNLSKCFGFVSYDNPVSAQAAIQAMNGFQIGMKRLKVQLKRSKNDSKPY

SEQ ID NO: 385 - protein, 205 aa, Homo sapiens
MAASTASHRPIKGILKNKTSTTSSMVASAEQPRGNVDEELSKKSQKWDEMNILATYHPADKDYGLMKIDEPSTPYHSMMGDDEDACSDTEATEAMAPDILARKLAAAEGLEPKYRIQEQESSGEEDSDLSPEEREKKRQFEMKRKLHYNEGLNIKLARQLISKDLHDDDEDEEMLETADGESMNTEESNQGSTPSDQQQNKLRSS

SEQ ID NO: 386 - protein, 108 aa, Homo sapiens
MRGAGEAVPPRGLREKFPRALFGWAGERPSALCASNPPQLSCSGRGARYFRLGEVLGTDVGSSVGDFSGFWPFQTLVIVFSVQSSFGVWGFPSSCARHREAWPEGPVS

SEQ ID NO: 387 - protein, 372 aa, Homo sapiens [sequence omitted]

SEQ ID NO: 388 - protein, 531 aa, Homo sapiens
MDEESLESALQTYRAQLQQVELALGAGLDSSEQADLRQLQGDLKELIELTEASLVSVRKSRLLAALDEERPGRQEDAEYQAFREAITEAVEAPAAARGSGSETVPKAEAGPESAAGGQEEEEGEDEEELSGTKVSAPYYSSWGTLEYHNAMVAGTEEAEDGSAGVRVLYLYPTHKSLKPRPFFLEGKCRFKENCRFSHGQVGSLDELRPFQDPDLSSLQAGSACLAKHQDGLWHAARITDVDNGYYTVKFDSLLLREAVVEGDGILPPLRTEATESDSDSDGTGDSSYARVVGSDAVDSAQSSALCPSLAVVGSDAVDSGTCSSAFAGWEVHTRGIGSRLLTKMGYEFGKGLGRHAEGRVEPIHAVVLPRGKSLDQCVETLQKQTRVGKAGTNKPPRCRGRGARPGGRPAPRNVFDFLNEKLQGQAPGALEAGAAPAGRRSKDMYHASKSAKRALSLRLFQTEEKIERTQRDIRSIQEALARNAGRHSVASAQLQEKLAGAQRQLGQLRAQEAGLQQEQRKADTHKKMTEF

SEQ ID NO: 389 - protein, 75 aa, Homo sapiens
MAGQEDPVQREIHQDWANREYIEIITSSIKKIADFLNSFDMSCRSRLATLNEKLTALERRIEYIEARVTKGETLT

SEQ ID NO: 390 - protein, 188 aa, Homo sapiens
MPGTVATLRFQLLPPEPDDAFWGAPCEQPLERRYQALPALVCIMCCLFGVVYCFFGYRCFKAVLFLTGLLFGSVVIFLLCYRERVLETQLSAGASAGIALGIGLLCGLVAMLVRSVGLFLVGLLLGLLLAAAALLGSAPYYQPGSVWGPLGLLPGGRPALCPAHSALAPPTHHPGHRRDWCCADRHCR

SEQ ID NO: 391 - protein, 358 aa, Homo sapiens [sequence omitted]

SEQ ID NO: 392 - protein, 447 aa, Homo sapiens
MIIPSLEELDSLKYSDLQNLAKSLGLRANLRATKLLKALKGYIKHEARKGNENQDESQTSASSCDETEIQISNQEEAERQPLGHVTKTRRRCKTVRVDPDSQQNHSEIKISNPTEFQNHEKQESQDLRATAKVPSPPDEHQEAENAVSSGKRGINGNRDSKVPSEGKKSLYTDESSKPGKNKRTAITTPNFKKLHEAHFKEMESIDQYIERKKKHFEEHNSMNELKQQPINKGGVRTPVPPRGRLSVASTPISQRRSQGRSCGPASQSTLGLKGSLKRSAISAAKTGVRFSAATKDNEHKRSLTKTPARKSAHVTVSGGTPKGEAVLGTHKLKTITGNSAAVITPFKLTTEATQTPVSNKKPVFDLKASLSRPLNYEPHKGKLKPWGQSKENNYLNQHVNRINFYKKTYKQPHLQTKEEQRKKREQERKEKKAKVLGMRRGLILAED

SEQ ID NO: 393 - protein, 830 aa, Homo sapiens
MRHLSTGTMTGLAIQYALNIAFSEAEGARPLRQNVPRVIMIVTDGRPQDSVAEVAAKARDTGILIFAIGVGQVDFNTLKSIGSEPHEDHVFLVANFSQIETLTSVFQKKLCTAHMCSTLEHNCAHFCINIPGSYVCRCKQGYILNSDQTTCRIQDLCAMEDHNCEQLCVNVPGSFVCQCYSGYALAEDGKRCVAVDYCASENHGCEHECVNADGSYLCQCHEGFALNPDKKTCTKIDYCASSNHGCQHECVNTDDSYSCHCLKGFTLNPDKKTCRRINYCALNKPGCEHECVNMEESYYCRCHRGYTLDPNGKTCSRVDHCAQQDHGCEQLCLNTEDSFVCQCSEGFLINEDLKTCSRVDYCLLSDHGCEYSCVNMDRSFACQCPEGHVLRSDGKTCAKLDSCALGDHGCEHSCVSSEDSFVCQCFEGYILREDGKTCRRKDVCQAIDHGCEHICVNSDDSYTCECLEGFRLAEDGKRCRRKDVCKSTHHGCEHICVNNGNSYICKCSEGFVLAEDGRRCKKCTEGPIDLVFVIDGSKSLGEENFEVVKQFVTGIIDSLTISPKAARVGLLQYSTQVHTEFTLRNFNSAKDMKKAVAHMKYMGKGSMTGLALKHMFERSFTQGEGARPLSTRVPRAAIVFTDGRAQDDVSEWASKAKANGITMYAVGVGKAIEEELQEIASEPTNKHLFYAEDFSTMDEISEKLKKGICEALEDSDGRQDSPAGELPKTVQQPTESEPVTINIQDLLSCSNFAVQHRYLFEEDNLLRSTQKLSHSTKPSGSPLEEKHDQCKCENLIMFQNLANEEVRKLTQRLEEMTQRMEALENRLRYR

SEQ ID NO: 394 - protein, 811 aa, Homo sapiens
MRHLSTGTMTGLAIQYALNIAFSEAEGARPLRQNVPRVIMIVTDGRPQDSVAEVAAKARDTGILIFAIGVGQVDFNTLKSIGSEPHEDHVFLVANFSQIETLTSVFQKKLCTAHMCSTLEHNCAHFCINIPGSYVCRCKQGYILNSDQTTCRIQDLCAMEDHNCEQLCVNVPGSFVCQCYSGYALAEDGKRCVAVDYCASENHGCEHECVNADGSYLCQCHEGFALNPDKKTCTKIDYCASSNHGCQHECVNTDDSYSCHCLKGFTLNPDKKTCRRINYCALNKPGCEHECVNMEESYYCRCHRGYTLDPNGKTCSRVDHCAQQDHGCEQLCLNTEDSFVCQCSEGFLINEDLKTCSRVDYCLLSDHGCEYSCVNMDRSFACQCPEGHVLRSDGKTCAKLDSCALGDHGCEHSCVSSEDSFVCQCFEGYILREDGKTCRRKDVCQAIDHGCEHICVNSDDSYTCECLEGFRLAEDGKRCRRKDVCKSTHHGCEHICVNNGNSYICKCSEGFVLAEDGRRCKKCTEGPIDLVFVIDGSKSLGEENFEVVKQFVTGIIDSLTISPKAARVGLLQYSTQVHTEFTLRNFNSAKDMKKAVAHMKYMGKGSMTGLALKHMFERSFTQGEGARPLSTRVPRAAIVFTDGRAQDDVSEWASKAKANGITMYAVGVGKAIEEELQEIASEPTNKHLFYAEDFSTMDEISEKLKKGICEALEDSDGRQDSPAGELPKTVQQPTVQHRYLFEEDNLLRSTQKLSHSTKPSGSPLEEKHDQCKCENLIMFQNLANEEVRKLTQRLEEMTQRMEALENRLRYR

SEQ ID NO: 395 - protein, 140 aa, Homo sapiens
MPGYGSHFKPLPQGHAIESISKSMFLALKCLRPLRISLPGGRWGNICHVKEQVLSVPGLEKDLRLRSGQSGIYFASPKYPAQSGKKKKLLLPSSSWQLDIKNKNIRSWTPVLSSCPSLTCWLKLPPWRPYLSLWTVTVDT

SEQ ID NO: 396 - protein, 168 aa, Homo sapiens
MNEVKESLRSIEQKYKLFQQQQLTFTAALEHCRENAHDKIRPISSIGQVQSYMEHYCNSSTDRRVLLMFLDICSELNKLCQHFEAVHSGTPVTNNLLEKCKTLVSQSNDLSSLRAKYPHDVVNHLSCDEARNHYGGVVSLIPLILDLMKEWIAHSEKLPRKVLQHGTT

SEQ ID NO: 397 - protein, 875 aa, Homo sapiens
MGDSDDEYDRRRRDKFRRERSDYDRSRERDERRRGDDWNDREWDRGRERRSRGEYRDYDRNRRERFSPPRHELSPPQKRMRRDWDEHSSDPYHSGYEMPYAGGGGGPTYGPPQPWGHPDVHIMQHHVLPIQARLGSIAEIDLGVPPPVMKTFKEFLLSLDDSVDETEAVKRYNDYKLDFRRQQMQDFFLAHKDEEWFRSKYHPDEVGKRRQEARGALQNRLRVFLSLMETGWFDNLLLDIDKADAIVKMLDAAVIKMEGGTENDLRILEQEEEEEQAGKPGEPSKKEEGRAGAGLGDGERKTNDKDEKKEDGKQAENDSSNDDKTKKSEGDGDKEEKKEDSEKEAKKSSKKRNRKHSGDDSFDEGSVSESESESESGQAEEEKEEAEALKEKEKPKEEEWEKPKDAAGLECKPRPLHKTCSLFMRNIAPNISRAEIISLCKRYPGFMRVALSEPQPERRFFRRGWVTFDRSVNIKEICWNLQNIRLRECELSPGVNRDLTRRVRNINGITQHKQIVRNDIKLAAKLIHTLDDRTQLWASEPGTPPLPTSLPSQNPILKNITDYLIEEVSAEEEELLGSSGGAPPEEPPKEGNPAEINVERDEKLIKVLDKLLLYLRIVHSLDYYNTCEYPNEDEMPNRCGIIHVRGPMPPNRISHGEVLEWQKTFEEKLTPLLSVRESLSEEEAQKMGRKDPEQEVEKFVTSNTQELGKDKWLCPLSGKKFKGPEFVRKHIFNKHAEKIEEVKKEVAFFNNFLTDAKRPALPEIKPAQPPGPAQILPPGLTPGLPYPHQTPQGLMPYGQPRPPILGYGAGAVRPAVPTGGPPYPHAPYGAGRGNYDAFRGQGGYPGKPRNRMVRGDPRAIVEYRDLDAPDDVDFF

SEQ ID NO: 398 - protein, 54 aa, Homo sapiens [sequence omitted]

SEQ ID NO: 399 - protein, 403 aa, Homo sapiens [sequence omitted]

SEQ ID NO: 400 - protein, 58 aa, Homo sapiens
MMLDNYVRDFKALIDWIQLQEKLEKTDAQSRPTSLAWEVKKMSPGRHVIPSPSTDRKM

SEQ ID NO: 401 - protein, 122 aa, Homo sapiens
MKMRKNQHKKAENFKNQNASSPLKDYNCSPAKEQNWTENEFDKLTEVGFRRTDVSGMASSLPSLEEWQGCSEPMDDSYLTLRKVTHGGSAPPPSTLQSGPLLNKGYCRSLTALRQALETHSL

SEQ ID NO: 402 - protein, 310 aa, Homo sapiens
MSQQLKKRAKTRHQKGLGGRAPSGAKPRQGKSSQDLQAEIEPVSAVWALCDGYVCYEPGPQALGGDDFSDCYIECVIRGEFSQPILEEDSLFESLEYLKKGSEQQLSQKVFEASSLECSLEYMKKGVKKELPQKIVGENSLEYSEYMTGKKLPPGGIPGIDLSDPKQLAEFARKKPPINKEYDSLSAIACPQSGCTRKLRNRAALRKHLLIHGPRDHVCAECGKAFVESSKLKRHFLVHTGEKPFRCTFEGCGKRFSLDFNLRTHVRIHTGEKRFVCPFQGCNRRFIQSNNLKAHILTHANTNKNEQEGK

SEQ ID NO: 403 - protein, 769 aa, Homo sapiens [sequence omitted]

SEQ ID NO: 404 - protein, 158 aa, Homo sapiens [sequence omitted]

SEQ ID NO: 405 - protein, 62 aa, Homo sapiens
MRLSFWAFCVVTVPDHGTFSLPQDRTFSLPQPPSCPGVESSKWKIPAISIGDAPISSCGTTV

SEQ ID NO: 406 - protein, 99 aa, Homo sapiens
MAEGNTLISVDYEIFGKVQGVFFRKHTQAEGKKLGLVGWVQNTDRGTVQGQLQGPISKVRHMQEWLETRGSPKSHIDKANFNNEKVILKLDYSDFQIVK

SEQ ID NO: 407 - protein, 956 aa, Homo sapiens
MAAAVGVRGRYELPPCSGPGWLLSLSALLSVAARGAFATTHWVVTEDGKIQQQVDSPMNLKHPHDLVILMRQEATVNYLKELEKQLVAQKIHIEENEDRDTGLEQRHNKEDPDCIKAKVPLGDLDLYDGTYITLESKDISPEDYIDTESPVPPDPEQPDCTKILELPYSIHAFQHLRGVQERVNLSAPLLPKEDPIFTYLSKRLGRSIDDIGHLIHEGLQKNTSSWVLYNMASFYWRIKNEPYQVVECAMRALHFSSRHNKDIALVNLANVLHRAHFSADAAVVVHAALDDSDFFTSYYTLGNIYAMLGEYNHSVLCYDHALQARPGFGQAIKRKHAVLCQQKLEQKLEAQHRSLQRTLNELKEYQKQHDHYLRQQEILEKHKLIQEEQILRNIIHETQMAKEAQLGNHQICRLVNQQHSLHCQWDQPVRYHRGDIFENVDYVQFGEDSSTSSMMSVNFDVQSNQSDINDSVKSSPVAHSILWIWGRDSDAYRDKQHILWPKRADCTESYPRVPVGGELPTYFLPPENKGLRIHELSSDDYSTEEEAQTPDCSITDFRKSHTLSYLVKELEVRMDLKAKMPDDHARKILLSRINNYTIPEEEIGSFLFHAINKPNAPIWLILNEAGLYWRAVGNSTFAIACLQRALNLAPLQYQDVPLVNLANLLIHYGLHLDATKLLLQALAINSSEPLTFLSLGNAYLALKNISGALEAFRQALKLTTKCPECENSLKLIRCMQFYPFLYNITSSVCSGNCHEKTLDNSHDKQKYFDNSQSLDAAEEEPSERGTEEDPVFSVENSGRDSDALRLESTVVEESNGSDEMENSDETKMSEEILALVDEFQQAWPLEGFGGALEMKGRRLDLQGIRVLKKGPQDGVARSSCYGDCRSEDDEATEWITFQVKRVKKPKGDHKKTPGKKVETGQIENGHRYQANLEITGPKVASPGPQGLLDWKTRKVP

SEQ ID NO: 408 - protein, 85 aa, Homo sapiens [sequence omitted]

SEQ ID NO: 409 - protein, 306 aa, Homo sapiens
METPEVPVGSLIDFGPEAPTSSPLEAPPPVLQDGDGSLGDGASESETTESADSENDMGESPSHPSWDQDRRSSSNESFSSNQSTESTQDEETLALRDFMRGYVEKIFSGGEDLDQEEKAKFGEYCSSENGKGREWFARYVSAQRCNSKCVSEATFYRLVQSFAVVLFECHQMDDFGPAKNLMTMCFTYYHIGKPQLLPPESREKPAGSIDSYLKSANSWLAEKKDIAERLLKNTSARTENVKGFFGGLETKLKGPLARRNEEDENKPQEKRPRAVTAYSPEDEKKGEKIYLYTHLKQQPIWHTLRF

SEQ ID NO: 410 - protein, 323 aa, Homo sapiens
MGNLLKVLTREIENYPHFFLDFENAQPTEGEREIWNQISAVLQDSESILADLQAYKGAGLEIRDAIQNPNDIQLQEKAWNAVCPLVVRLKRFYEFSIRLEKALQSLLESLTCPPYTPTQHLEREQALAKEFAEILHFTLRFDELKMRNPAIQNDFSYYRRTISRNRINNMHLDIENEVNNEMANRMSLFYAEATPMLKTLSNATMHFVSENKTLPIENTTDCLSTMTSVCKVMLETPEYRSRFTSEETLMFCMRVMVGVIILYDHVHPVGAFCKTSKIDMKGCIKVLKEQAPDSVEGLLNALRFTTKHLNDESTSKQIRAMLQ

SEQ ID NO: 411 - protein, 86 aa, Homo sapiens
MVLCPFIRRLLKNWAVCKANPAPCPSRFSERGVPWDGAAPLTAAPRFQSLDATNQHGLCSGHRVNFSLTPGAGPVPARSSYSVEVC

SEQ ID NO: 412 - protein, 187 aa, Homo sapiens
MKCPDQKCLYTCQIKDGGVQPQFEIVPEDDPQNAIVSSSADACHAELLRTISTTMGKLMPNLLPAGADFFGFSHPAIHNLIQSCPGARKCINYQWVKFDVCKPGDGQLPEGLPENDAAMSFEAFQRQIFDEDQNDPLLPGSLDLPELQPAAFVSSYQPMYLTHEPLVDTHLQHLKSPSQGSPIQSSD

SEQ ID NO: 413 - protein, 67 aa, Homo sapiens
MSGPAATTFHWKKCRLDLPGHVALQACKRLPDEHNHVQKKTFTKWINARFSKVTETFKNFDGSDAAF

SEQ ID NO: 414 - protein, 980 aa, Homo sapiens [sequence omitted]

SEQ ID NO: 415 - protein, 4097 aa, Homo sapiens [sequence omitted]

SEQ ID NO: 416 - protein, 4128 aa, Homo sapiens
MAGSGAGVRCSLLRLQETLSAADRCGAALAGHQLIRGLGQECVLSSSPAVLALQTSLVFSRDFGLLVFVRKSLNSIEFRECREEILKFLCIFLEKMGQKIAPYSVEIKNTCTSVYTKDRAAKCKIPALDLLIKLLQTFRSSRLMDEFKIGELFSKFYGELALKKKIPDTVLEKVYELLGLLGEVHPSEMINNAENLFRAFLGELKTQMTSAVREPKLPVLAGCLKGLSSLLCNFTKSMEEDPQTSREIFNFVLKAIRPQIDLKRYAVPSAGLRLFALHASQFSTCLLDNYVSLFEVLLKWCAHTNVELKKAALSALESFLKQVSNMVAKNAEMHKNKLQYFMEQFYGIIRNVDSNNKELSIAIRGYGLFAGPCKVINAKDVDFMYVELIQRCKQMFLTQTDTGDYRVYQMPSFLQSVASVLLYLDTVPEVYTPVLEHLVVMQIDSFPQYSPKMQLVCCRAIVKVFLALAAKGPVLRNCISTVVHQGLIRICSKPVVLPKGPESESEDHRASGEVRTGKWKVPTYKDYVDLFRHLLSSDQMMDSILADEAFFSVNSSSESLNHLLYDEFVKSVLKIVEKLDLTLEIQTVGEQENGDEAPGVWMIPTSDPAANLHPAKPKDFSAFINLVEFCREILPEKQAEFFEPWVYSFSYELILQSTRLPLISGFYKLLSITVRNAKKIKYFEGVSPKSLKHSPEDPEKYSCFALFVKFGKEVAVKMKQYKDELLASCLTFLLSLPHNIIELDVRAYVPALQMAFKLGLSYTPLAEVGLNALEEWSIYIDRHVMQPYYKDILPCLDGYLKTSALSDETKNNWEVSALSRAAQKGFNKVVLKHLKKTKNLSSNEAISLEEIRIRVVQMLGSLGGQINKNLLTVTSSDEMMKSYVAWDREKRLSFAVPFREMKPVIFLDVFLPRVTELALTASDRQTKVAACELLHSMVMFMLGKATQMPEGGQGAPPMYQLYKRTFPVLLRLACDVDQVTRQLYEPLVMQLIHWFTNNKKFESQDTVSLLEAILDGIVDPVDSTLRDFCGRCIREFLKWSIKQITPQQQEKSPVNTKSLFKRLYSLALHPNAFKRLGASLAFNNIYREFREEESLVEQFVFEALVIYMESLALAHADEKSLGTIQQCCDAIDHLCRIIEKKHVSLNKAKKRRLPRGFPPSASLCLLDLVKWLLAHCGRPQTECRHKSIELFYKFVPLLPGNRSPNLWLKDVLKEEGVSFLINTFEGGGCGQPSGILAQPTLLYLRGPFSLQATLCWLDLLLAALECYNTFIGERTVGALQVLGTEAQSSLLKAVAFFLESIAMHDIIAAEKCFGTGAAGNRTSPQEGERYNYSKCTVVVRIMEFTTTLLNTSPEGWKLLKKDLCNTHLMRVLVQTLCEPASIGFNIGDVQVMAHLPDVCVNLMKALKMSPYKDILETHLREKITAQSIEELCAVNLYGPDAQVDRSRLAAVVSACKQLHRAGLLHNILPSQSTDLHHSVGTELLSLVYKGIAPGDERQCLPSLDLSCKQLASGLLELAFAFGGLCERLVSLLLNPAVLSTASLGSSQGSVIHFSHGEYFYSLFSETINTELLKNLDLAVLELMQSSVDNTKMVSAVLNGMLDQSFRERANQKHQGLKLATTILQHWKKCDSWWAKDSPLETKMAVLALLAKILQIDSSVSFNTSHGSFPEVFTTYISLLADTKLDLHLKGQAVTLLPFFTSLTGGSLEELRRVLEQLIVAHFPMQSREFPPGTPRFNNYVDCMKKFLDALELSQSPMLLELMTEVLCREQQHVMEELFQSSFRRIARRGSCVTQVGLLESVYEMFRKDDPRLSFTRQSFVDRSLLTLLWHCSLDALREFFSTIVVDAIDVLKSRFTKLNESTFDTQITKKMGYYKILDVMYSRLPKDDVHAKESKINQVFHGSCITEGNELTKTLIKLCYDAFTENMAGENQLLERRRLYHCAAYNCAISVICCVFNELKFYQGFLFSEKPEKNLLIFENLIDLKRRYNFPVEVEVPMERKKKYIEIRKEAREAANGDSDGPSYMSSLSYLADSTLSEEMSQFDFSTGVQSYSYSSQDPRPATGRFRRREQRDPTVHDDVLELEMDELNRHECMAPLTALVKHMHRSLGPPQGEEDSVPRDLPSWMKFLHGKLGNPIVPLNIRLFLAKLVINTEEVFRPYAKHWLSPLLQLAASENNGGEGIHYMVVEIVATILSWTGLATPTGVPKDEVLANRLLNFLMKHVFHPKRAVFRHNLEIIKTLVECWKDCLSIPYRLIFEKFSGKDPNSKDNSVGIQLLGIVMANDLPPYDPQCGIQSSEYFQALVNNMSFVRYKEVYAAAAEVLGLILRYVMERKNILEESLCELVAKQLKQHQNTMEDKFIVCLNKVTKSFPPLADRFMNAVFFLLPKFHGVLKTLCLEVVLCRVEGMTELYFQLKSKDFVQVMRHRDDERQKVCLDIIYKMMPKLKPVELRELLNPVVEFVSHPSTTCREQMYNILMWIHDNYRDPESETDNDSQEIFKLAKDVLIQGLIDENPGLQLIIRNFWSHETRLPSNTLDRLLALNSLYSPKIEVHFLSLATNFLLEMTSMSPDYPNPMFEHPLSECEFQEYTIDSDWRFRSTVLTPMFVETQASQGTLQTRTQEGSLSARWPVAGQIRATQQQHDFTLTQTADGRSSFDWLTGSSTDPLVDHTSPSSDSLLFAHKRSERLQRAPLKSVGPDFGKKRLGLPGDEVDNKVKGAAGRTDLLRLRRRFMRDQEKLSLMYARKGVAEQKREKEIKSELKMKQDAQVVLYRSYRHGDLPDIQIKHSSLITPLQAVAQRDPIIAKQLFSSLFSGILKEMDKFKTLSEKNNITQKLLQDFNRFLNTTFSFFPPFVSCIQDISCQHAALLSLDPAAVSAGCLASLQQPVGIRLLEEALLRLLPAELPAKRVRGKARLPPDVLRWVELAKLYRSIGEYDVLRGIFTSEIGTKQITQSALLAEARSDYSEAAKQYDEALNKQDWVDGEPTEAEKDFWELASLDCYNHLAEWKSLEYCSTASIDSENPPDLNKIWSEPFYQETYLPYMIRSKLKLLLQGEADQSLLTFIDKAMHGELQKAILELHYSQELSLLYLLQDDVDRAKYYIQNGIQSFMQNYSSIDVLLHQSRLTKLQSVQALTEIQEFISFISKQGNLSSQVPLKRLLNTWTNRYPDAKMDPMNIWDDIITNRCFFLSKIEEKLTPLPEDNSMNVDQDGDPSDRMEVQEQEEDISSLIRSCKFSMKMKMIDSARKQNNFSLAMKLLKELHKESKTRDDWLVSWVQSYCRLSHCRSRSQGCSEQVLTVLKTVSLLDENNVSSYLSKNILAFRDQNILLGTTYRIIANALSSEPACLAEIEEDKARRILELSGSSSEDSEKVIAGLYQRAFQHLSEAVQAAEEEAQPPSWSCGPAAGVIDAYMTLADFCDQQLRKEEENASVIDSAELQAYPALVVEKMLKALKLNSNEARLKFPRLLQIIERYPEETLSLMTKEISSVPCWQFISWISHMVALLDKDQAVAVQHSVEEITDNYPQAIVYPFIISSESYSFKDTSTGHKNKEFVARIKSKLDQGGVIQDFINALDQLSNPELLFKDWSNDVRAELAKTPVNKKNIEKMYERMYAALGDPKAPGLGAFRRKFIQTFGKEFDKHFGKGGSKLLRMKLSDFNDITNMLLLKMNKDSKPPGNLKECSPWMSDFKVEFLRNELEIPGQYDGRGKPLPEYHVRIAGFDERVTVMASLRRPKRIIIRGHDEREHPFLVKGGEDLRQDQRVEQLFQVMNGILAQDSACSQRALQLRTYSVVPMTSRLGLIEWLENTVTLKDLLLNTMSQEEKAAYLSDPRAPPCEYKDWLTKMSGKHDVGAYMLMYKGANRTETVTSFRKRESKVPADLLKRAFVRMSTSPEAFLALRSHFASSHALICISHWILGIGDRHLNNFMVAMETGGVIGIDFGHAFGSATQFLPVPELMPFRLTRQFINLMLPMKETGLMYSIMVHALRAFRSDPGLLTNTMDVFVKEPSFDWKNFEQKMLKKGGSWIQEINVAEKNWYPRQKICYAKRKLAGANPAVITCDELLLGHEKAPAFRDYVAVARGSKDHNIRAQEPESGLSEETQVKCLMDQATDPNILGRTWEGWEPWM

SEQ ID NO: 417 - protein, 25 aa, Homo sapiens [sequence omitted]

SEQ ID NO: 418 - protein, 426 aa, Homo sapiens
MWRGLWTLAAQAARGPRRLCTRRSSGAPAPGSGATIFALSSGQGRCGIAVIRTSGPASGHALRILTAPRDLPLARHASLRLLSDPRSGEPLDRALVLWFPGPQSFTGEDCVEFHVHGGPAVVSGVLQALGELQRWALAHVEAYIDFGEDDNLEEGPTSKYGHCRWPLGAHLRDARRGQRLRSGVHVVVTGPPNAGKSSLVNLLSRKPVSIVSPEPGTTRDVLETPVDLAGFPVLLSDTAGLREGVGPVEQEGVRRARERLEQADLILAMLDASDLASPSSCNFLATVVASVGAQSPSDSSQRLLLVLNKSDLLSPEGPGPGPDLPPHLLLSCLTGEGLDGLLEALRKELAAVCGDPSTDPPLLTRARHQHHLQGCLDALGHYKQSKDLALAAEALRVARGHLTRLTGGGGTEEILDIIFQDFCVGK

SEQ ID NO: 419 - protein, 216 aa, Homo sapiens
MVFRRFVEVGRVAYVSFGPHAGKLVAIVDVIDQNRALVDGPCTQVRRQAMPFKCMQLTDFILKFPHSAHQKYVRQAWQKADINTKWAATRWAKKIEARERKAKMTDFDRFKVMKAKKMRNRIIKNEVKKLQKAALLKASPKKAPGTKGTAAAAAAAAAAAKVPAKKITAASKKAPAQKVPAQKATGQKAAPAPKAQKGQKAPAQKAPAPKASGKKA

SEQ ID NO: 420 - protein, 500 aa, Homo sapiens [sequence omitted]

SEQ ID NO: 421 - protein, 641 aa, Homo sapiens
MLREEATKKSKEKEPGMALPQGRLTFRDVAIEFSLEEWKCLNPAQRALYRAVMLENYRNLEFVDSSLKSMTEFSSTGHGNTGEVIHTGTLQRHKSHHIGDFCFPEIKKDIHDFEFQWQEIKRNGHEAPMTKIKKLTGSTDRRDQRHAGNKPIKDQLGSSFYSHLPELHEFQTEGKIDNQVEKSINNASLVSTSQRISCRLKTHISNRYGKNFLHSSLLTQIQEEHVREKPFQCNECGKAFNYSSHLRRHHVTHSGEKQYKCDVCGKVFHQKQYLAWHHRVHTGEKPYKCNECSKTFGHKSSLTRHHRLHTGEKPYKCNECGKTFSQTSSLVGHRRRHTGEKPYKCEGCDKVYSCRSQLETHRRIHTGEKPYKCKVCDKAFRHNSCLSRHNRVHTEEKPYTCNECGKVFQRDSYLAQHQRVHTGEKPYTCNECGKVFNQKAHLACHYRLHTGEKPYKCNECGKTFSQKSSLVGHRRLHTGEKPYNCHECGKTFARNSSLLIHKAIHTGEKPYKCNECGKVFNQQSNLAQHQRVHTGEKPYRCNECGKTFSHMSSFVYHYRLHSGEKPYKCNECGKTFSHMSSFVCHHRLHTGENPYKCNECGKAFSGQSSLIHHQAIHGIGKLYKCNDSHKVLSNATSIANH

SEQ ID NO: 422 - protein, 161 aa, Homo sapiens
MGCCYSSENEDSDQDREERKLLLDPSSPPTKALNGAEPNYHSLPSARTDEQALLSSILAKTASNIIDVSAADSQGMEQHEYMDRARQYSTRLAVLSSSLTHWKKLPPLPSLTSQPHQVLASEPIPFSDLQQVSRIAAYAYSALSQIRVDAKEELVVQFGIP

SEQ ID NO: 423 - protein, 460 aa, Homo sapiens
MAAAAARVVLSSAARRRLWGFSESLLIRGAAGRSLYFGENRLRSTQAATQVVLNVPETRVTCLESGLRVASEDSGLSTCTGTKKRSQLDLELEIENMGAHLNAYTSREQTVYYAKAFSKDLPRAVEILADIIQNSTLGEAEIERERGVILREIQEVETNLQEVVFDYLHATAYQNTALGRTILGPTENIKSISRKDLVDYITTHYKGPRIVLAAAGGVSHDELLDLAKFHFGDSLCTHKGEIPALPPCKFTGSEIRVRDDKMPLAHLAIAIAAVGWAHPDTICLMVANTLIGNWDRSFGGGMNLSSKLAQLTCHGNLCHSFQSFNTSYTDTGLWGLYMVCESSTVADMLHVVQKEWMRLCTSVTESEVARARNLLKTNMLLQLDGSTPICEDIGRQMLCYNRRIPIPELEARIDAVNAETIREVCTKYIYNRSPAIAAVGPIKQLPDFKQIRSNMCWLRD

SEQ ID NO: 424 - protein, 97 aa, Homo sapiens
MVQIDFFFFLRQSLALSPRLECSGPVSAHCDLRLPDSSDSPALASKVAGTTGVRHHSRPISVFLAKTGVSPYWPGWSRTHDLAIRPPRPPKVLGPQA

SEQ ID NO: 425 - protein, 58 aa, Homo sapiens [sequence omitted]

SEQ ID NO: 426 - protein, 288 aa, Homo sapiens
MSWSLHPRNLILYFYALLFLSSTCVAYVATRDNCCILDERFGSYCPTTCGIADFLSTYQTKVDKDLQSLEDILHQVENKTSEVKQLIKAIQLTYNLDESSKPNMIDAATLKSRKMLEEIMKYEASILTHDSSIRYLQEIYNSNNQKIVNLKEKVAQLEAQCQEPCKDTVQIHDITGKDCQDIANKGAKQSGLYFIKPLKANQQFLVYCEIDGSGNGWTVFQKRLDGSVDFKKNWIQYKEGFGHLSPTGTTEFWLGNEKIHLISTQSAIPYALRVGLGRLEWQNQYLGQ

SEQ ID NO: 427 - protein, 411 aa, Homo sapiens
MKPIATVGESYQYPPVNWAALLSPLMRLNFGEEIQQLCLEIMVTQAQSSQNAAALLGLWVTPPLIHSLSLNTKRYLLISAPLWIKHISDEQILGFVENLMVAVFKAASPLGSPELCPSALHGLSQAMKLPSPAHHLWSLLSEATGKIFDLLPNKIRRKDLELYISIAKCLLEMTDDDANRIAQVTKSNIEKAAFVKLYLVSQGRFPLVNLTDMLSVAVQHREKEVLAWMILHSLYQARIVSHANTGVLKRMEWLLELMGYIRNVAYQSTSFHNTALDEALDFFLLIFATAVVAWADHTAPLLLGLSASWLPWHQENGPAGPVPSFLGRSPMHRVTLQEVLTLLPNSMALLLQKEPWKEQTQKFIDWLFSIMESPKEALSAQSRDLLKATLLSLRVLPEFKKKAVWTRAYGW

SEQ ID NO: 428 - protein, 81 aa, Homo sapiens [sequence omitted]

SEQ ID NO: 429 - protein, 194 aa, Homo sapiens [sequence omitted]

SEQ ID NO: 430 - protein, 142 aa, Homo sapiens
MRTLLTILTVGSLAAHAPEDPSDLLQHVKFQSSNFENILTWDSGPEGTPDTVYSIEYKTYGERDWVAKKGCQRITRKSCNLTVETGNLTELYYARVTAVSAGGRSATKMTDRFSSLQHTRRPTAFITFSKESVNQQSYPQAT

SEQ ID NO: 431 - protein, 401 aa, Homo sapiens
MSIALKQVFNKDKTFRPKRKFEPGTQRFELHKRAQASLNSGVDLKAAVQLPSGEDQNDWVAVHVVDFFNRINLIYGTICEFCTERTCPVMSGGPKYEYRWQDDLKYKKPTALPAPQYMNLLMDWIEVQINNEEIFPTCVVNSHVSFEVQLRYHVLCEGFHPLEYQLFKLCNMSNSSDYHPLTLVLVTFKLLDGWMDGWMDGLGILLQLTGRKEVAKYCGLTYYGPQISHPYLASQSGKEKACSQGHLSSHVFEEKCEQMCQREMEEEEANVEQCDIVSSRAHTLEMVDLGVKIGQSDLRSIYLTTSLYNTVTKSHKAQGWFIELASPQEMTFGPWTTGYARPGMSDSLAQGALKSWRAAESTHPLAMSEIFMAAPPITGPEAQQEKVVLWAGPRIPVLYAA

SEQ ID NO: 432 - protein, 275 aa, Homo sapiens
MSRELAPLLLLLLSIHSALAMRICSFNVRSFGESKQEDKNAMDVIVKVIKRCDIILVMEIKDSNNRICPILMEKLNREKLVSVKRSYHYHDYQDGDADVFSREPFVVWFQSPHTAVKDFVIIPLHTTPETSVKEIDELVEVYTDVKHRWKAENFIFMGDFNAGCSYVPKKAWKNIRLRTDPRFVWLIGDQEDTTVKKSTNCAYDRIVLRGQEIVSSVVPKSNSVFDFQKAYKLTEEEALDVSDHFPVEFKLQSSRAFTNSKKSVTLRKKTKSKRS

SEQ ID NO: 433 - protein, 92 aa, Homo sapiens
MKLCVTVLSLLVLVAAFCSLALSAPMGSDPPTACCFSYTARKLPRNFVVDYYETSSLCSQPAVVFQTKRGKQVCADPSESWVQEYVYDLELN

SEQ ID NO: 434 - protein, 54 aa, Homo sapiens
MEYLEFVCHAPSEYFKSRSSPFPTVPTRPEKGYIWTHVGPTPAITIKESVANHL

SEQ ID NO: 435 - protein, 87 aa, Homo sapiens [sequence omitted]

SEQ ID NO: 436 - protein, 335 aa, Homo sapiens [sequence omitted]

SEQ ID NO: 437 - protein, 235 aa, Homo sapiens [sequence omitted]

SEQ ID NO: 438 - protein, 357 aa, Homo sapiens [sequence omitted]

SEQ ID NO: 439 - protein, 71 aa, Homo sapiens
MADSMQEKLRMAGQMLLQTFFNIDHISPNKKAHPNMEAVPPESGESTDALKLCSHEEFLRLCKKELKRSIQ

SEQ ID NO: 440 - protein, 112 aa, Homo sapiens
MAEAHKEAMSRKLGQSESQGPPRAFAKVNSISPGSPASIAGLQVDDEIVEFGSVNTQNFQSLHNIGSVVQHSEGKPLNVTVIRRGEKHQLRLVPTRWAGKGLLGCNIIPLQR

SEQ ID NO: 441 - protein, 90 aa, Homo sapiens
MSGSFYFVIVGHHDNPVFEMEFLPAGKAESKDDHRHLNQFIAHAALDLVDENMWLSNNMYLKTVDKFNEWFVSAFVTAGHILTFLVKVTN

SEQ ID NO: 442 - protein, 962 aa, Homo sapiens [sequence omitted]

SEQ ID NO: 443 - protein, 1002 aa, Homo sapiens
MATAATSPALKRLDLRDPAALFETHGAEEIRGLERQVRAEIEHKKEELRQMVGERYRDLIEAADTIGQMRRCAVGLVDAVKATDQYCARLRQAGSAAPRPPRAQQPQQPSQEKFYSMAAQIKLLLEIPEKIWSSMEASQCLHATQLYLLCCHLHSLLQLDSSSSRYSPVLSRFPILIRQVAAASHFRSTILHESKMLLKCQGVSDQAVAEALCSIMLLEESSPRQALTDFLLARKATIQKLLNQPHHGAGIKAQICSLVELLATTLKQAHALFYTLPEGLLPDPALPCGLLFSTLETITGQHPAAVGMDDIISKEMTEDSALWNSRNPRSNGGVSKIDKGDTAKGKGTGVLQEEMKLCSWFKHLPASIVEFQPTLRTLAHPISQEYLKDTLQKWIHMCNEDIKNGITNLLMYVKSMKGLAGIRDAMWELLTSESTNHSWDVLCRRLLEKPLLFWEDMMQQLFLDRLQTLTKEGFDSISSSSKELLVSALQELESSTSNSPSNKHIHFEYNMSLFLWSESPNDLPSDAAWVSVANRGQFASSGLSMKAQAISPCVQNFCSALDSKLKVKLDDLLAYLPSDDSSLPKDVSPTQAKSSAFDRYADAGTVQEMLRTQSVACIKHIVDCIRAELQSIEEGVQGQQDALNSAKLHSVLFMARLCQSLGELCPHLKQCILGKSESSEKPAREFRALRKQGKVKTQEIIPTQAKWQEVKEVLLQQSVMGYQVWSSAVVKVLIHGFTQSLLLDDAGSVLATATSWDELEIQEEAESGSSVTSKIRLPAQPSWYVQSFLFSLCQEINRVGGHALPKVTLQEMLKSCMVQVVAAYEKLSEEKQIKKEGAFPVTQNRALQLLYDLRYLNIVLTAKGDEVKSGRSKPDSRIEKVTDHLEALIDPFDLDVFTPHLNSNLHRLVQRTSVLFGLVTGTENQLAPRSSTFNSQEPHNILPLASSQIRFGLLPLSMTSTRKAKSTRNIETKAQVGAKSKRLIRGWVPTSHRATHDQLPFK

SEQ ID NO: 444 - protein, 256 aa, Homo sapiens
MPLHKYPVWLWKRLQLREGICSRLPGHYLRSLEEERTPTPVHYRPHGAKFKINPKNGQRERVEDVPIPIYFPPESQRGLWGGEGWILGQIYANNDKLSKRLKKVWKPQLFEREFYSEILDKKFTVTVTMRTLDLIDEAYGLDFYILKTPKEDLCSKFGMDLKRGMQLRLARQDPQLHPEDPERRAAIYDKYKEFAIPEEEAEWVGLTLEEAIEKQRLLEEKDPVPLFKIYVAELIQQLQQQALSEPAVVQKRASGQ

SEQ ID NO: 445 - protein, 1178 aa, Homo sapiens
MGLAQEAQRQEVLQQVLRLQVREEGRSLQLLSQETHGTRHIPGAHKHTVFHDTLACRCSQKTAVPHQHPDTETCRSLDTWILKSRHIVPSPVLSVPRHLQTTQPTPDPSAPCLQKPKLWGREGPGTGSEPLPPELGKGDPMECITFGIIFAAVGLRTLWSCVHCRAACWEGGLEVEMTDPFCVGGRRLPGSSKSGPGKDGSRKEVRLPMLHDPPKMGMPVVRGGQTVPGQAPLCFDPGSPASDKTEGKKKGRPKAENQALRDIPLSLMNDWKDEFKAHSRVKCPNSGCWLEFPSIYGLKYHYQRCQGGAISDRLAFPCPFCEAAFTSKTQLEKHRIWNHMDRPLPASKPGPISRPVTISRPVGVSKPIGVSKPVTIGKPVGVSKPIGISKPVSVGRPMPVTKAIPVTRPVPVTKPVTVSRPMPVTKAMPVTKPITVTKSVPVTKPVPVTKPITVTKLVTVTKPVPVTKPVTVSRPIVVSKPVTVSRPIAISRHTPPCKMVLLTRSENKAPRATGRNSGKKRAADSLDTCPIPPKQARPENGEYGPSSMGQSSAFQLSADTSSGSLSPGSRPSGGMEALKAAGPASPPEEDPERTKHSLVKAEDKARVHRSKKQEGPGPEDARKKVPAAPITVSKEAPAPVAHPAPGGPEEQWQRAIHERGEAVCPTCNVVTRKTLVGLKKHMEVCQKLQDALKCQHCRKQFKSKAGLNYHTMAEHSAKPSDAEASEGGEQEERERLRKVLKQMGRLRCPQEGCGAAFSSLMGYQYHQRRCGKPPCEVDSPSFPCTHCGKTYRSKAGHDYHVRSEHTAPPPEEPTDKSPEAEDPLGVERTPSGRVRRTSAQVAVFHLQEIAEDELARDWTKRRMKDDLVPETARLNYTRPGLPTLNPQLLEAWKNEVKEKGHVNCPNDVSGGSRCCEAIYSSVSGLKAHLASCSKGAHLAGKYRCLLCPKEFSSESGVKYHILKTHAEPPAALLQVLAWSRRLCPALLQVLAWSRRLCPAPCRCLPGPEGCVQPPAAGACLVLKAVSSPLLQAVSSPAAGACLVLKAVSSPAAGACLVLKAVSSPAAGACLVLKAVSSPAAGACLVLKAVSSPLLQNWFRTSADPPPKHRSQDSLVPKKEKKKNLAGGKKRGRKPKERTPEEPVAKLPPRRDDWPPGCRDKGARGSTGRKVGVSKAPEK

SEQ ID NO: 446 - protein, 1172 aa, Homo sapiens
MGLAQEAQRQEVLQQVLRLQVREEGRSLQLLSQETHGTRHIPGAHKHTVFHDTLACRCSQKTAVPHQHPDTETCRSLDTWILKSRHIVPSPVLSVPRHLQTTQPTPDPSAPCLQKPKLWGREGPGTGSEPLPPELGKGDPMECITFGIIFAAVGLRTLWSCVHCRAACWEGGLEVEMTDPFCVGGRRLPGSSKSGPGKDGSRKEVRLPMLHDPPKMGMPVVRGGQTVPGQAPLCFDPGSPASDKTEGKKKGRPKAENQALRDIPLSLMNDWKDEFKAHSRVKCPNSGCWLEFPSIYGLKYHYQRCQGGAISDRLAFPCPFCEAAFTSKTQLEKHRIWNHMDRPLPASKPGPISRPVTISRPVGVSKPIGVSKPVTIGKPVGVSKPIGISKPVSVGRPMPVTKAIPVTRPVPVTKPVTVSRPMPVTKAMPVTKPITVTKSVPVTKPVPVTKPITVTKLVTVTKPVPVTKPVTVSRPIVVSKPVTVSRPIAISRHTPPCKMVLLTRSENKAPRATGRNSGKKRAADSLDTCPIPPKQARPENGEYGPSSMGQSSAFQLSADTSSGSLSPGSRPSGGMEALKAAGPASPPEEDPERTKHSLVKAEDKARVHRSKKQEGPGPEDARKKVPAAPITVSKEAPAPVAHPAPGGPEEQWQRAIHERGEAVCPTCNVVTRKTLVGLKKHMEVCQKLQDALKCQHCRKQFKSKAGLNYHTMAEHSAKPSDAEASEGGEQEERERLRKVLKQMGRLRCPQEGCGAAFSSLMGYQYHQRRCGKPPCEVDSPSFPCTHCGKTYRSKAGHDYHVRSEHTAPPPEEPTDKSPEAEDPLGVERTPSGRVRRTSAQVAVFHLQEIAEDELARDWTKRRMKDDLVPETARLNYTRPGLPTLNPQLLEAWKNEVKEKGHVNCPNDCCEAIYSSVSGLKAHLASCSKGAHLAGKYRCLLCPKEFSSESGVKYHILKTHAEPPAALLQVLAWSRRLCPALLQVLAWSRRLCPAPCRCLPGPEGCVQPPAAGACLVLKAVSSPLLQAVSSPAAGACLVLKAVSSPAAGACLVLKAVSSPAAGACLVLKAVSSPAAGACLVLKAVSSPLLQNWFRTSADPPPKHRSQDSLVPKKEKKKNLAGGKKRGRKPKERTPEEPVAKLPPRRDDWPPGCRDKGARGSTGRKVGVSKAPEK

SEQ ID NO: 447 - protein, 817 aa, Homo sapiens
MMQSQSRSCTELHKHLTSAQCCLQDRGLQPPCLQSPRLPAKEDKEPGEDCPSPQPAPASPRDSLALGRADPGAPVSQEDMQAMVQLIRYMHTYCLPQRKLPPQTPEPLPKACSNPSQQVRSRPWSRHHSKASWAEFSILRELLAQDVLCDVSKPYRLATPVYASLTPRSRPRPPKDSQASPGRPSSVEEVRIAASPKSTGPRPSLRPLRLEVKREVRRPARLQQQEEEDEEEEEEEEEEEKEEEEEWGRKRPGRGLPWTKLGRKLESSVCPVRRSRRLNPELGPWLTFADEPLVPSEPQGALPSLCLAPKAYDVERELGSPTDEDSGQDQQLLRGPQIPALESPCESGDPTFGKKSFEQTLTVELCGTAGEPGGFHWQVPSGKHPCISEFFIMHGQGLTPPTTPPYKPTEEDPFKPDIKHSLGKEIALSLPSPEGLSLKATPGAAHKLPKKHPERSELLSHLRHATAQPASQAGQKRPFSCSFGDHDYCQVLRPEGVLQRKVLRSWEPSGVHLEDWPQQGAPWAEAQAPGREEDRSCDAGAPPKDSTLLRDHEIRASLTKHFGLLETALEEEDLASCKSPEYDTVFEDSSSSSGESSFLPEEEEEEGEEEEEDDEEEDSGVSPTCSDHCPYQSPPSKANRQLCSRSRSSSGSSPCHSWSPATRRNFRCESRGPCSDRTPSIRHARKRREKAIGEGRVVYIQNLSSDMSSRELKRRFEVFGEIEECEVLTRNRRGEKYGFITYRCSEHAALSLTKGAALRKRNEPSFQLSYGGLRHFCWPRYTDYDSNSEEALPASGKSKYEAMDFDSLLKEAQQSLH

SEQ ID NO: 448 - protein, 145 aa, Homo sapiens
MMGICPSCVLWGMKSCSSCSFPFPLRGGGWGCQGSTLGGGCWGCQGSTLCSLGRGKEAPPCMLCRGPCRPLCLRGRRRGPLGKCAHTHTHTHTRTCTHARMHTHTHICAGVQPKSGEPGLGAQLGLPHSWSPQGMSLRIHFVPCF

SEQ ID NO: 449 - protein, 622 aa, Homo sapiens [sequence omitted]

SEQ ID NO: 450 - protein, 324 aa, Homo sapiens
MSDSDLGEDEGLLSLAGKRKRRGNLPKESVKILRDWLYLHRYNAYPSEQEKLSLSGQTNLSVLQICNWFINARRRLLPDMLRKDGKDPNQFTISRRGGKASDVALPRGSSPSVLAVSVPAPTNVLSLSVCSMPLHSGQGEKPAAPFPRGELESPKPLVTPGSTLTLLTRAEAGSPTGGLFNTPPPTPPEQDKEDFSSFQLLVEVALQRAAEMELQKQQDPSLPLLHTPIPLVSENPQPPLSDETKRSETSMVLLLLLLLQKIPGTPLFQPGFLGWAQESCQIQSYVGSKLPLCCFCQARCGHSKFICVNKRKEEPSGCNRTDSS

SEQ ID NO: 451 - protein, 305 aa, Homo sapiens
MGIQTSPVLLASLGVGLVTLLGLAVGSYLVRRSRRPQVTLLDPNEKYLLRLLDKTTVSHNTKRFRFALPTAHHTLGLPVGKHIYLSTRIDGSLVIRPYTPVTSDEDQGYVDLVIKVYLKGVHPKFPEGGKMSQYLDSLKVGDVVEFRGPSGLLTYTGKGHFNIQPNKKSPPEPRVAKKLGMIAGGTGITPMLQLIRAILKVPEDPTQCFLLFANQTEKDIILREDLEELQARYPNRFKLWFTLDHPPKDWAYSKGFVTADMIREHLPAPGDDVLVLLCGPPPMVQLACHPNLDKLGYSQKMRFTY

SEQ ID NO: 452 - protein, 199 aa, Homo sapiens
MFSLPLNCSPDHIRRGSCWGRPQDLKIAAPAWNSKCHPGAGAAMARQHARTLWYDRPMYVFMEFCVEDSTDVHVLIEDHRIVFSCKNADGVELYNEIEFYAKVNSKDSQDKRSSRSITCFVRKWKEKVAWPRLTKEDIKPVWLSVDFDNWRDWEGDEEMELAHVEHYAELLKKVSTKRPPPAMDDLDDDSDSADDATSN

SEQ ID NO: 453 - protein, 212 aa, Homo sapiens
MEAKTLGTVTPRKPVLSVSARKIKDNAADWHNLILKWETLNDAGFTTANNIANLKISLLNKDKIELDSSSPASKENEEKVCLEYNEELEKLCEELQATLDGLTKIQVKMEKLSSTTKGICELENYHYGEESKRPPLFHTWPTTHFYEVSHKLLEMYRKELLLKRTVAKELAHTGDPDLTLSYLSMWLHQPYVESDSRLHLESMLLETGHRAL

SEQ ID NO: 454 - protein, 403 aa, Homo sapiens
MEPAGPCGFCPAGEVQPARYTCPRCNAPYCSLRCYRTHGTCAENFYRDQVLGELRGCSAPPSRLASALRRLRQQRETEDEPGEAGLSSGPAPGGLSGLWERLAPGEKAAFERLLSRGEAGRLLPPWRPWWWNRGAGPQLLEELDNAPGSDAAELELAPARTPPDSVKDASAAEPAAAERVLGDVPGACTPVVPTRIPAIVSLSRGPVSPLVRFQLPNVLFAYAHTLALYHGGDDALLSDFCATLLGVSGALGAQQVFASAEEALQAAAHVLEAGEHPPGPLGTRGAMHEVARILLGEGPTNQKGYTLAALGDLAQTLGRARKQAVAREERDHLYRARKKCQFLLAWTNENEAALTPLALDCARAHQAHAVVAEEVAALTGELERLWGGPVPPAPRTLIEELPS

SEQ ID NO: 455 - protein, 179 aa, Homo sapiens
MALRSQFWGFSVCRNPGCRFAALSTSSEPAAKPEVDPVENEAVAPEFTNRNPRNLELLSVARKERGWRTVFPSREFWHRLRVIRTQHHVEALVEHQNGKVVVSASTREWAIKKHLYSTRNVVACESIGRVLAQRCLEAGINFMVYQPTPWEAASDSMKRLQSAMTEGGVVLREPQRIYE

SEQ ID NO: 456 - protein, 451 aa, Homo sapiens
MPREIITLQLGQCGNQIGFEFWKQLCAEHGISPEGIVEEFATEGTDRKDVFFYQADDEHYIPRAVLLDLEPRVIHSILNSPYAKLYNPENIYLSEHGGGAGNNWASGFSQGEKIHEDIFDIIDREADGSDSLEGFVLCHSIAGGTGSGLGSYLLERLNDRYPKKLVQTYSVFPYQDEMSDVVVQPYNSLLTLKRLTQNADCVVVLDNTALNRIATDRLHIQNPSFSQINQLVSTIMSASTTTLRYPGYMNNDLIGLIASLIPTPRLHFLMTGYTPLTTDQSVASVRKTTVLDVMRRLLQPKNVMVSTGRDRQTNHCYIAILNIIQGEVDPTQVHKSLQRIRERKLANFIPWGPASIQVALSRKSPYLPSAHRVSGLMMANHTSISSLFESSCQQFDKLRKRDAFLEQFRKEDMFKDTFDEMDRSREVVQELIDEYHAATQPDYISWGTQEQ

SEQ ID NO: 457 - protein, 1823 aa, Homo sapiens
MALSSAWRSVLPLWLLWSAACSRAASGDDNAFPFDIEGSSAVGRQDPPETSEPRVALGRLPPAAEKCNAGFFHTLSGECVPCDCNGNSNECLDGSGYCVHCQRNTTGEHCEKCLDGYIGDSIRGAPQFCQPCPCPLPHLANFAESCYRKNGAVRCICNENYAGPNCERCAPGYYGNPLLIGSTCKKCDCSGNSDPNLIFEDCDEVTGQCRNCLRNTTGFKCERCAPGYYGDARIAKNCAVCNCGGGPCDSVTGECLEEGFEPPTGMDCPTISCDKCVWDLTDALRLAALSIEEGKSGVLSVSSGAAAHRHVNEINATIYLLKTKLSERENQYALRKIQINNAENTMKSLLSDVEELVEKENQASRKGQLVQKESMDTINHASQLVEQAHDMRDKIQEINNKMLYYGEEHELSPKEISEKLVLAQKMLEEIRSRQPFFTQRELVDEEADEAYELLSQAESWQRLHNETRTLFPVVLEQLDDYNAKLSDLQEALDQALNHVRDAEDMNRATAARQRDHEKQQERVREQMEVVNMSLSTSADSLTTPRLTLSELDDIIKNASGIYAEIDGAKSELQVKLSNLSNLSHDLVQEAIDHAQDLQQEANELSRKLHSSDMNGLVQKALDASNVYENIVNYVSEANETAEFALNTTDRIYDAVSGIDTQIIYHKDESENLLNQARELQAKAESSSDEAVADTSRRVGGALARKSALKTRLSDAVKQLQAAERGDAQQRLGQSRLITEEANRTTMEVQQATAPMANNLTNWSQNLQHFDSSAYNTAVNSARDAVRNLTEVVPQLLDQLRTVEQKRPASNVSASIQRIRELIAQTRSVASKIQVSMMFDGQSAVEVHSRTSMDDLKAFTSLSLYMKPPVKRPELTETADQFILYLGSKNAKKEYMGLAIKNDNLVYVYNLGTKDVEIPLDSKPVSSWPAYFSIVKIERVGKHGKVFLTVPSLSSTAEEKFIKKGEFSGDDSLLDLDPEDTVFYVGGVPSNFKLPTSLNLPGFVGCLELATLNNDVISLYNFKHIYNMDPSTSVPCARDKLAFTQSRAASYFFDGSGYAVVRDITRRGKFGQVTRFDIEVRTPADNGLILLMVNGSMFFRLEMRNGYLHVFYDFGFSSGPVHLEDTLKKAQINDAKYHEISIIYHNDKKMILVVDRRHVKSMDNEKMKIPFTDIYIGGAPPEILQSRALRAHLPLDINFRGCMKGFQFQKKDFNLLEQTETLGVGYGCPEDSLISRRAYFNGQSFIASIQKISFFDGFEGGFNFRTLQPNGLLFYYASGSDVFSISLDNGTVIMDVKGIKVQSVDKQYNDGLSHFVISSVSPTRYELIVDKSRVGSKNPTKGKIEQTQASEKKFYFGGSPISAQYANFTGCISNAYFTRVDRDVEVEDFQRYTEKVHTSLYECPIESSPLFLLHKKGKNLSKPKASQNKKGGKSKDAPSWDPVALKLPERNTPRNSHCHLSNSPRAIEHAYQYGGTANSRQEFEHLKGDFGAKSQFSIRLRTRSSHGMIFYVSDQEENDFMTLFLAHGRLVYMFNVGHKKLKIRSQEKYNDGLWHDVIFIRERSSGRLVIDGLRVLEESLPPTEATWKIKGPIYLGGVAPGKAVKNVQINSIYSFSGCLSNLQLNGASITSASQTFSVTPCFEGPMETGTYFSTEGGYVVLDESFNIGLKFEIAFEVRPRSSSGTLVHGHSVNGEYLNVHMKNGQVIVKVNNGIRDFSTSVTPKQSLCDGRWHRITVIRDSNVVQLDVDSEVNHVVGPLNPKPIDHREPVFVGGVPESLLTPRLAPSKPFTGCIRHFVIDGHPVSFSKAALVSGAVSINSCPAA

SEQ ID NO: 458 - protein, 327 aa, Homo sapiens
MTLTCETQLSPQRPDVQLQFSLFRDSQTLGLGWSRSPRLQIPAMWTEDSGSYWCEVETVTHSIKKRSLRSQIRVQRVPVSNVNLEIRPTGGQLIEGENMVLICSVAQGSGTVTFSWHKEGRVRSLGRKTQRSLLAELHVLTVKESDAGRYYCAADNVHSPILSTWIRVTVRIPVSHPVLTFRAPRAHTVVGDLLELHCESLRGSPPILYRFYHEDVTLGNSSAPSGGGASFNLSLTAEHSGNYSCDADNGLGAQHSHGVSLRVTVPVSRPILTLRAPRAQAVVGDLLELHCEAPRGSPPILYWFYHEDVTLGSSSAPLEEKLLSTSL

SEQ ID NO: 459 - protein, 785 aa, Homo sapiens
MFHSSAMVNSHRKPMFNIHRGFYCLTAILPQICICSQFSVPSSYHFTEDPGAFPVATNGERFPWQELRLPSVVIPLHYDLFVHPNLTSLDFVASEKIEVLVSNATQFIILHSKDLEITNATLQSEEDSRYMKPGKELKVLSYPAHEQIALLVPEKLTPHLKYYVAMDFQAKLGDGFEGFYKSTYRTLGGETRILAVTDFEPTQARMAFPCFDEPLFKANFSIKIRRESRHIALSNMPKVKTIELEGGLLEDHFETTVKMSTYLVAYIVCDFHSLSGFTSSGVKVSIYASPDKRNQTHYALQASLKLLDFYEKYFDIYYPLSKLDLIAIPDFAPGAMENWGLITYRETSLLFDPKTSSASDKLWVTRVIAHELAHQWFGNLVTMEWWNDIWLKEGFAKYMELIAVNATYPELQFDDYFLNVCFEVITKDSLNSSRPISKPAETPTQIQEMFDEVSYNKGACILNMLKDFLGEEKFQKGIIQYLKKFSYRNANNDDLWSSLSNSCLESDFTSGGVCHSDPKMTSNMLAFLGENAEVKEMMTTWTLQKGIPLLVVKQDGCSLRLQQERFLQGVFQEDPEWRALQERYLWHIPLTYSTSSSNVIHRHILKSKTDTLDLPEKTSWVKFNVDSNGYYIVHYEGHGWDQLITQLNQNHTLLRPKDRVGLIHDVFQLVGAGRLTLDKALDMTYYLQHETSSPALLEGLSYLESFYHMMDRRNISDISENLKRYLLQYFKPVIDRQSWSDKGSVWDRMLRSALLKLACDLNHAPCIQKAAELFFQWMESSGKLK

SEQ ID NO: 460 - protein, 92 aa, Homo sapiens
MVQAPKKHSVSGSYFLLFFETRSVTQAGVQRHDHGSLQSQPPRLKRSSHLSLQSSWDHRCVPSHSANFKIMNICRGEVSLRCPGWSRAPDLK

SEQ ID NO: 461 - protein, 1427 aa, Homo sapiens
MGKPLSRPDCLRRNPSCLGKGEEEDGYIEDCYVPQRSIYDTMRINEQIDQGSKLNQTSKSTMEKMEGSTISSNGTLGAASNVFESRAPEGKKLDERIIFDALKLSSDVQKSAPVPPRRRPNAERKDNVNRRSWKSFMPPNFPEFAERIEASLSEVSEAGASNPSLQEKKESSSALTESSGHLDHREPQSESVTLEHVSKSIGIPEVQDFKNLSGDCQDFRFQQHSANPPHEFQPVESEAVATSGNTDVMQESRFSSATWPRATKSLAKGGFSEKQHPLGDTACTVEMPPLSPCLSEELLDPELHVLITPSLREKTESELKFEEDERWIMMEAEGEWEEEKLSDREKTFLVADEKNSLADIFEEREQANTAVVEDGSDCLAAVLRTFGHLSLGQICCPDDPQPAKDQLATVPKDIPLDCDCVLTGEDILGEVANRTAQGLEGLVSDSACTVGTIDAEQLSDTDSVQMFLELEKECLCEEGVTPLVELQNQISSEGLAASQDAENLLVISHFSGAALEKEQHLGLLHVRAKDYDTRLDCGYFNTLDSSQVPNAVELIAHVDIMRDTSTVSKEECEKVPFSPRTAEFKSRQPADLDSLEKLDPGGLLNSDHRVSHEEKLSGFIASELAKDNGSLSQGDCSQTEGNGEECIERVTFSFAFNHELTDVTSGPEVEVLYESNLLTDEIHLESGNVTVNQENNSLTSMGNVVTCELSVEKVCDEDGEAKELDYQATLLEDQAPAHFHRNFPEQVFQDLQRKSPESEILSLHLLVEELRLNPDGVETVNDTKPELNVASSEGGEMERRDSDSFLNIFPEKQVTKAGNTEPVLEEWIPVLQRPSRTAAVPTVKDALDAALPSPEEGTSIAAVPAPEGTAVVAALVPFPHEDILVASIVSLEEEDVTAAAVSAPERATVPAVTVSVPEGTAAVAAVSSPEETAPAVAAAITQEGMSAVAGFSPEWAALAITVPITEEDGTPEGPVTPATTVHAPEEPDTAAVRVSTPEEPASPAAAVPTPEEPTSPAAAVPTPEEPTSPAAAVPPPEEPTSPAAAVPTPEEPTSPAAAVPTPEEPTSPAAAVPTPEEPTSPAAAVPTPEEPTSPAAAVPTPEEPTSPAAAVPTPEEPASPAAAVPTPEEPASPAAAVPTPEEPAFPAPAVPTPEESASAAVAVPTPEESASPAAAVPTPAESASFAAVVATLEEPTSPAASVPTPAAMVATLEEFTSPAASVPTSEEPASLAAAVSNPEEPTSPAAAVPTLEEPTSSAAAVLTPEELSSPAASVPTPEEPASPAAAVSNLEEPASPAAAVPTPEVAAIPAASVPTPEVPAIPAAAVPPMEEVSPIGVPFLGVSAHTDSVPISEEGTPVLEEASSTGMWIKEDLDSLVFGIKEVTSTVLHGKVPLAATAGLNSDEVIVHFDSGKGLKSKVRFAGLTWW

SEQ ID NO: 462 - protein, 360 aa, Homo sapiens
MAGHLASDFAFSPPPGGGGDGPGGPEPGWVDPRTWLSFQGPPGGPGIGPGVGPGSEVWGIPPCPPPYEFCGGMAYCGPQVGVGLVPQGGLETSQPEGEAGVGVESNSDGASPEPCTVTPGAVKLEKEKLEQNPEESQDIKALQKELEQFAKLLKQKRITLGYTQADVGLTLGVLFGKVFSQTTICRFEALQLSFKNMCKLRPLLQKWVEEADNNENLQEICKAETLVQARKRKRTSIENRVRGNLENLFLQCPKPTLQQISHIAQQLGLEKDVVRVWFCNRRQKGKRSSSDYAQREDFEAAGSPFSGGPVSFPLAPGPHFGTPGYGSPHFTALYSSVPFPEGEAFPPVSVTTLGSPMHSN

SEQ ID NO: 463 - protein, 109 aa, Homo sapiens
MSFNTLLHHPGSLLHHPGFPAPSSRLPCSIIPASLLHHPNCRALSFQLQRVSSQMACSIIPAVVLHHARSPVHHPGPPAPSSWLHGPSSCSPLCHHNRPLHHLGLRGTS

SEQ ID NO: 464 - protein, 569 aa, Homo sapiens
MFCPADQDVRMTSKSPGHCAFAVLYGKDGREHATTRWPITRDDHHNQMMLTYILYPSRALSGKSFGPMSVSIALRAQEPLCKDNGPRALRPSGDVLFLTDRTVGQCQTLAVTTISPTAKVLQPKGAIENQLDIKVLHVPTRFRSPAGFTQWIPHWGCRWSCLPVPHRVPALLSPWVVDGTGCRGAGGGARQGGSGRTGAHGAGGGSGMAGCRSRALPHGKAAKARREIQHSAGGPALLGDPAHPPQPLARVLSPSLPGARRAGQLLRLPGRQAHAHPELQLARKRRTQPRFPLAPLPPHLPGKHADGQVVESVGSDPTAASRVECLQLPKPQWACVTMRFFSFAVHRQLVLISSIRPSVLLQGQKAFCIPGSCLSVLEKSDHTWALLNGGSSSQQMDGEPEGGWSGKVGPWRTLGNKNPMGTTWFRLCSTWLLAADADWDYTPALLDLQLAACRSWDFSVSIIMSANSLQEISLSIYPIGSVFWRTLTDIQVKVAGAVAFLRGTSRQSWSPVRFGDAAPIYYLDFLTEMVLGAPAGFYPYLGQRMHGDGGGQIQFYLEKIGAKPETAKL

SEQ ID NO: 465 - protein, 101 aa, Homo sapiens
MCICIYHAAGVSFMLLSPGEVTSTIKGGSEMASGFLGVGQGPAGGFPSRCTEGSAEPTVCRGCVPRALPRPPPALASALQGGVPILGAVCHAHLTQVCVPV

SEQ ID NO: 466 - protein, 626 aa, Homo sapiens
MYQGHMQKSKEQGYGKLSSDEDLEIIVDQKQGKGSRAADKAVAMVMKEIPREESAEEKPLLTMTSQLVNEQQESRPLLSPSIDDFLCETKSEAIARPVTSNTAVLTTGLDLLDLSEPVSQTQTKAKKSEPSSKTSSLKKKADGSDLISTDAEQRGQPLRVPETSSLDLDIQTQLEKWDDVKFHGDRNTKGHPMAERKSSSSRTGSKELLWSSEHRSQPELSGGKSALNSESASELELVAPTQARLTKEHRWGSALLSRNHSLEEEFERAKAAVESDTEFWDKMQAEWEEMARRNWISENQEAQNQVTISASEKGYYFHTENPFKDWPGAFEEGLKRLKEGDLPVTILFMEAAILQDPGDAEAWQFLGITQAENENEQAAIVALQRCLELQPNNLKALMALAVSYTNTGHQQDACDALKNWIKQNPKYKYLVKSKKGSPGLTRRMSKSPVDSSVLEGVKELYLEAAHQNGDMIDPDLQTGLGVLFHLSGEFNRAIDAFNAALTVRPEDYSLWNRLGATLANGDRSEEAVEAYTRALEIQPGFIRSRYNLGISCINLGAYREAVSNFLTALSLQRKSRNQQQVPHPAISGNIWAALRIALSLMDQPELFQAANLGDLDVLLRAFNLDP

SEQ ID NO: 467 - protein, 82 aa, Homo sapiens
MTQEQLEQIRLVQKQQIQEKLRLQEEKRQRDLDWDRRRIQGARATLLFERQQWRQQRDLRRALDSSNLSLAKEQHLQKKYMK

SEQ ID NO: 468 - protein, 430 aa, Homo sapiens
MVAKLESECLKRQGQREPGSLSRNNSFRRNVGRVLLANSTQADEGKTKKGVLEAPDTQVNPVGSVSVDCGPSRADRCSPKEDQAWDGASQDCPPLPAGVSFHIDSAELEPGSQTAVKNSNRYDVEMTDELVGLPFSSHTYSQASELPTDAVDCMSRELVSLTSRNPDQRKESLCISITVSKVDKDQPSNLNSCEDPVPGMLFFLPPGQHLSDYSQLNESTTKESSEASQLEDAAGGDSASEEKSGSAEPFVLPASSVESTLPVLEASSWKKQVSHDFLETRFKIQQLLEPQQYMAFLPHHIMVKIFRLLPTKSLVALKCTCCYFKFIIEYYNIRPADSRWVRDPRYREDPCKQCKKKYVKGDVSLCRWHPKPYCQALPYGPGYWMCCHRSQKGFPGCKLGLHDNHWVPACHSFNRAIHKKAKGTEAEEEY

SEQ ID NO: 469 - protein, 192 aa, Homo sapiens [sequence omitted]

SEQ ID NO: 470 - protein, 166 aa, Homo sapiens
MSKLGRAARGLRKPERGVSINQFCKEFNERTKDIKEGIPLPTKILVKPDRTFEIKIGQPTVSYFLKAAAGIEKGARQTGKEVAGLVTLKHVYEIARIKAQDEAFALQDVPLSSVVRSIIGSARSLGIRVVKDLSSEELAAFQKERAIFLAAQKEADLAAQEEAAKK

SEQ ID NO: 471 - protein, 334 aa, Homo sapiens
MVSPPPDYPGEFFKDVRQGLIGVGLINVEDRSGILTLDKDYNNIGKFLNRILGMEVHQQNELFQYFADTLTAVVQNAKKNGRYDMGILDLGSGDEKVRKSDVKKFLTPGYSTSGHVELYTISVERGMSWEEATKIWAELTGPDDGFYLSLQIRNNKKTAILVKEVNPKKKLFLVYRPNTGKQLKLEIYADLKKKYKKVVSDDALMHWLDQYNSSADTCTHAYWRGNCKKASLGLVCEIGLRFRTYYVLCGSVLSVWTKVEGVLASVSGTNVKMQIVRLITEDGQRIVGLIIPANCVSPLVNLLSTSDQSQQLAVQQKQLWQQHHPQSITNLSNA

SEQ ID NO: 472 - protein, 147 aa, Homo sapiens
MPDANPSSGHVQPAGQPRGSLSSRAKDSRLPFSLLAFLLCPAVAAGEAAAAGGRRSCLSAPPCPTPAPALEIWSPLELSWTGGQLRACALNAALSRGREQDGEWKESPPGFVNCKKGPFQDDTRNRARALAQSLGACLFFIIVFKSL

SEQ ID NO: 473 - protein, 531 aa, Homo sapiens
MERILFDPQNSTVRKQADETTQLPTHATLQEKGKTALRVLYLKNLSPRVTERDLVSLFARFQEKKGPPIQFRMMTGRMRGQAFITFPNKEIAWQALHLVNGYKLHGKILVIEFGKNKKQRSNLQATSLISCATVLETRSPRSRCWQVQCLVKAILPFQDDTLLLHPPEGKNAAPFYGGGKMINPSCPGGLGATVCWTYFTHTSMSDGGGIQVPPMTIYTEQDLYNHVVPKPHNKRVPILPFVIRAGVLGRLGTGIGSITTSTQFYYKLSQEINGDMEQVTDSLVTLQDQLNSLAAVVLQNRRALDLLTAKRGGTCLFLGEECCYYVNQSRIVTEKVKEIRDRIQCRAEELQNTEHWGLLSQWMPWVLPFLGPLAALILLLLFGPCIFNLLVKFVSSRIEAVKLQMVLQMEPQMQSMTKIYHGPLDQPASPCSDVNDIKGTPPEEISTAQPLPCPISAGSRKEEYVYVVLLAFPEGIILQALGNTRKGKGESGVHGHSFPPFWSMEQEEDTRPSPDTKSAGILISASQPLNM

SEQ ID NO: 474 - protein, 224 aa, Homo sapiens
MDLKHLARRETLMPLSMKLLGKLLWQMPFSLIKQTLVPEEDVKKLRATIRSINGLGQILETQRSRVDLSNVLDLHAFDSLSGISLQKKLQHVPGTQPHLDQSIVTITFEVPGNAKEEHLNMFIQNLLWEKNVRNKDNHCMEVIRLKGLVSIKDKSQQVIVQGVHELYDLEETPVSWKDDTERTNRLVLLGRNLDKDILKQLFIATVTETEKQWTTHFKEDQVCT

SEQ ID NO: 475 - protein, 179 aa, Homo sapiens
MGCCYSSENEDSDQDREERKLLLDPSSPPTKALNGAEPNYHSLPSARTDEQALLSSILAKTASNIIDVSAADSQGMEQHEYMDRARQYSTRLAVLSSSLTHWKKLPPLPSLTSQPHQVLASEPIPFSDLQQVSRIAAYAYSALSQIRVDAKEELVVQFGDPMKKRGPGKAPLPLLSPHF

SEQ ID NO: 476 - protein, 963 aa, Homo sapiens
MDAPKAGYAFEYLIETLNDSSHKKFFDVSKLGTKYDVLPYSIRVLLEAAVRNCDGFLMKKEDVMNILDWKTKQSNVEVPFFPARVLLQDFTGIPAMVDFAAMREAVKTLGGDPEKVHPACPTDLTVDHSLQIDFSKCAIQNAPNPGGGDLQKAGKLSPLKVQPKKLPCRGQTTCRGSCDSGELGRNSGTFSSQIENTPILCPFHLQPVPEPETVLKNQEVEFGRNRERLQFFKWSSRVLKNVAVIPPGTGMAHQINLEYLSRVVFEEKDLLFPDSVVGTDSHITMVNGLGILGWGVGGIETEAVMLGLPVSLTLPEVVGCELTGSSNPFVTSIDVVLGITKHLRQVGVAGKFVEFFGSGVSQLSIVDRTTIANMCPEYGAILSFFPVDNVTLKHLEHTGFSKAKLESMETYLKAVKLFRNDQNSSGEPEYSQVIQINLNSIVPSVSGPKRPRDRVAVTDMKSDFQACLNEKVGFKGFQIAAEKQKDIVSIHYEGSEYKLSHGSVVIAAVISCTNNCNPSVMLAAGLLAKKAVEAGLRVKPYIRTSLSPGSGMVTHYLSSSGVLPYLSKLGFEIVGYGCSTCVGNTAPLSDAVLNAVKQGDLVTCGNFIWKKNFEGRLCDCVRANYLASPPLVVAYAIAGTVNIDFQTEPLGTDPTGKNIYLHDIWPSREEVHRVEEEHVILSMFKALKDKIEMGNKRWNSLEAPDSVLFPWDLKSTYIRCPSFFDKLTKEPIALQAIENAHVLLYLGDSVTTDHISPAGSIARNSAAAKYLTNRGLTPREFNSYGARRGNDAVMTRGTFANIKLFNKFIGKPAPKTIHFPSGQTLDVFEAAELYQKEGIPLIILAGKKYGSGNSRDWAAKGPYLLGVKAVLAESYEKIHKDHLIGIGIAPLQFLPGENADSLGLSGRETFSLTFPEELSPGITLNIQTSTGKVFSVIASFEDDVEITLYKHGGLLNFVARKFS

SEQ ID NO: 477 - protein, 140 aa, Homo sapiens
MVHLTPEEKSAVTALWGKVNVDEVGGEALGRLLVVYPWTQRFFESFGDLSTPDAVMGNPKVKAHGKKVLGAFSDGLAHLDNLKGTFATLSELHCDKLHVDPENFRLLGQRAGLCAGPITLGKEFHPTSAGCLSESGGWCG

SEQ ID NO: 478 - protein, 140 aa, Homo sapiens [sequence omitted]

SEQ ID NO: 479 - protein, 236 aa, Homo sapiens
MRLAGQVRQGPGDFVQLPVPVIQQLYHWDCGLACSRMVLRYLGQLDDSEFERALQKLQLTRSIWTIDLAYLMHHFGVRHRFCTQTLGVDKGYKNQSFYRKHFDTEETRVNQLFAQAKACKVLVEKCTVSVKDIQAHLAQGHVAIVLVNSGVLHCDLCSSPVKYCCFTPSGHHCFCRTPDYQGHFIVLRGYNRATGCIFYNNPAYADRMCSTSISNFEEARTSYGTDEDILFVYLDS

SEQ ID NO: 480 - protein, 198 aa, Homo sapiens
MTSEITYAEVRFKNEFKSSGINTASSAVFFQKYSQLLEKKTTKELVHTTLECVKKNMPVEETAWSCCPKNWKSFSSNCYFISTESASWQDSEKDCARMEAHLLVINTQEEQDFIFQNLQEESAYFVGLSDPEGQRHWQWVDQTPYNESSTFWHPREPSDPNERCVVLNFRKSPKRWGWNDVNCLGPQRSVCEMMKIHL

SEQ ID NO: 481 - protein, 186 aa, Homo sapiens [sequence omitted]

SEQ ID NO: 482 - protein, 1231 aa, Homo sapiens
MVLLWEPAGAWLALGLALALGPSVAAAAPRQDCTGVECPPLETCIEEALEPGACCATCVQQGCACEGYQYYDCLQGGFVRGRVPAGQSYFVDFGSTECSCPPGGGKISCQFMLCPELPPNCIEAVVVADSCPQCGQVGCVHAGHEYAAGHTVHLPPCRACHCPDAGGELICYQLPGCHGNFSDAEEGDPERHYEDPYSYDQEVAEVEAATALGGEVQAGAVQAGAGGPPAALGGGSQPLSTIQAPPWPAVLPRPTAAAALGPPAPVQAKARRVTEDSEEEEEEEEEREEMAVTEQLAAGGHRGLDGLPTTAPAGPSLPIQEERAEAGARAEAGARPEENLILDAQATSRSTGPEGVTHAPSLGKAALVPTQAVPGSPRDPVKPSPHNILSTSLPDAAWIPPTREVPRKPQVLPHSHVEEDTDPNSVHSIPRSSPEGSTKDLIETCCAAGQQWAIDNDECLEIPESGTEDNVCRTAQRHCCVSYLQEKSCMAGVLGAKEGETCGAEDNDSCGISLYKQCCDCCGLGLRVRAEGQSCESNPNLGYPCNHVMLSCCEGEEPLIVPEVRRPPEPAAAPRRVSEAEMAGREALSLGTEAELPNSLPGDDQDECLLLPGELCQHLCINTVGSYHCACFPGFSLQDDGRTCRPEGHPPQPEAPQEPALKSEFSQVASNTIPLPLPQPNTCKDNGPCKQVCSTVGGSAICSCFPGYAIMADGVSCEDQDECLMGAHDCSRRQFCVNTLGSFYCVNHTVLCADGYILNAHRKCVDINECVTDLHTCSRGEHCVNTLGSFHCYKALTCEPGYALKDGECEDVDECAMGTHTCQPGFLCQNTKGSFYCQARQRCMDGFLQDPEGNCVDINECTSLSEPCRPGFSCINTVGSYTCQRNPLICARGYHASDDGAKCVDVNECETGVHRCGEGQVCHNLPGSYRCDCKAGFQRDAFGRGCIDVNECWASPGRLCQHTCENTLGSYRCSCASGFLLAADGKRCEDVNECEAQRCSQECANIYGSYQCYCRQGYQLAEDGHTCTDIDECAQGAGILCTFRCLNVPGSYQCACPEQGYTMTANGRSCKDVDECALGTHNCSEAETCHNIQGSFRCLRFECPPNYVQVSKTKCERTTCHDFLECQNSPARITHYQLNFQTGLLVPAHIFRIGPAPAFTGDTIALNIIKGNEEGYFGTRRLNAYTGVVYLQRAVLEPRDFALDVEMKLWRQGSVTTFLAKMHIFFTTFAL

SEQ ID NO: 483 - protein, 257 aa, Homo sapiens
MVSPVSKDATEDLRKATGPLEAQALVKQDLLPADQAQVLNEMAKYQVPQRSGDIVMIQSEHTGAIDVLSADLESADLLGDHRKVSPPLMAPPCIWTFAKVKEFKSKLGKEKNSRLVVKRGEVVTIRVPTHPEGKRVCWEFATDDYDIGFGVYFDWTPVTSTDITVQVSDSSDDEDEEEEEEEEIEEPVPAGDVERGSRSSLRGRYGEVMPVYRRDSHRDVQAGSHDYPGEGIYLLKFDNSYSLLRNKTLYFHIYYTS

SEQ ID NO: 484 - protein, 245 aa, Homo sapiens
MALALCLQVLCSLCGWLSLYISFCHLNKHRSYEWSCRLVTFTHGVLSIGLSAYIGFIDGPWPFTHPGSPNTPLQVHVLCLTLGYFIFDLGWCVYFQSEGALMLAHHTLSILGIIMALVLGESGTEVNAVLFGSELTNPLLQMRWFLRETGHYHSFTGDVVDFLFVALFTGVRIGVGACLLFCEMVSPTPKWFVKAGGVAMYAVSWCFMFSIWRFAWRKSIKKYHAWRSRRSEERQLKHNGHLKIH

SEQ ID NO: 485 - protein, 86 aa, Homo sapiens
MVVPAALKVVRLKPTRKFAYLGRLAHEVGWKYQAVTATLEEKRKEKAKIHYRKKKQLMRLRKQAEKNVEKKIDKYTEVLKTHGLLV

SEQ ID NO: 486 - protein, 558 aa, Homo sapiens
MSATSVDTQRTKGQDNKVQNGSLHQKDTVHDNDFEPYLTGQANQSNSYPSMSDPYLSSYYPPSIGFPYSLNEAPWSTAGDPPIPYLTTYGQLSNGDHHFMHDAVFGQPGGLGNNIYQHRFNFFPENPAFSAWGTSGSQGQQTQSSAYGSSYTYPPSSLGGTVVDGQPGFHSDTLSKAPGMNSLEQGMVGLKIGDVSSSAVKTVGSVVSSVALTGVLSGNGGTNVNMPVSKPTSWAAIASKPAKPQPKMKTKSGPVMGGGLPPPPIKHNMDIGTWDNKGPVPKASPPAGTLSTGCPTAPAGGSALPAQPPALAQPQYQSPQQPPQTRWVAPRNRNAAFGQSGGAGSDTNSPGNVQPNSAPSVESHPVLEKLKAAHSYNPKEFEWNLKSGRVFIIKSYSEDDIHRSIKYSIWCSTEHGNKRLDSAFRCMSSKGPVYLLFSVNGSGHFCGVAEMKSPVDYGTSAGVWSQDKWKGKFDVQWIFVKDVPNNQLRHIRLENNDNKPVTNSRDTQEVPLEKAKQVLKIISSYKHTTSIFDDFAHYEKRQEEEEVVRKERQSRNKQ

SEQ ID NO: 487 - protein, 338 aa, Homo sapiens [sequence omitted]

SEQ ID NO: 488 - protein, 547 aa, Homo sapiens
MDIIFGRNRKEQLEPVRAKVTGKIPAWLQGTLLRNGPGMHTVGESRYNHWFDGLALLHSFTIRDGEVYYRSKYLRSDTYNTNIEANRIVVSEFGTMAYPDPCKNIFSKAFSYLSHTIPDFTDNCLINIMKCGEDFYATSETNYIRKINPQTLETLEKVDYRKYVAVNLATSHPHYDEAGNVLNMGTSIVEKGKTKYVIFKIPATVPEGKKQGKSPWKHTEVFCSIPSRSLLSPSYYHSFGVTENYVIFLEQPFRLDILKMATAYIRRMSWASCLAFHREEKTYIHIIDQRTRQPVQTKFYTDAMVVFHHVNAYEEDGCIVFDVIAYEDNSLYQLFYLANLNQDFKENSRLTSVPTLRRFAVPLHVDKNAEVGTNLIKVASTTATALKEEDGQVYCQPEFLYEGLELPRVNYAHNGKQYRYVFATGVQWSPIPTKIIKYDILTKSSLKWREDDCWPAEPLFVPAPGAKDEDDGVILSAIVSTDPQKLPFLLILDAKSFTELARASVDVDMHMDLHGLFITDMDWDTKKQAASEEQRDRASDCHGAPLT

SEQ ID NO: 489 - protein, 235 aa, Homo sapiens
MAWIPLLLPLLTLCTGSEASYELTQPPSVSVSPGQTARITCSGDALPKQYAYWYQQKPGQAPVLVIYKDSERPSGIPERFSGSSSGTTVTLTISGVQAEDEADYYCQSADSSGTYPGYVFGTGTKVTVLGQPKANPTVTLFQPSSEELQANKATLVCLISDFYPGAVTVAWKADGSPVKAGVETTKPSKQSNNKYAASSYLSLTPEQWKSHRSYSCQVTHEGSTVEKTVAPTECS

SEQ ID NO: 490 - protein, 610 aa, Homo sapiens [sequence omitted]
